(19) United States
(12) Patent Application Publication
(10) Pub. No.: US 2006/0234237 A1
(43) Pub. Date: Oct. 19, 2006

(54) Biomarkers and methods for determining sensitivity to epidermal growth factor receptor modulators

(76) Inventors: Lukas C. Amler, Foster City, CA (US); Thomas Januario, San Francisco, CA (US)

Correspondence Address: LOUIS J. WILLE;BRISTOL-MYERS SQUIBB COMPANY, PATENT DEPARTMENT, P O BOX 4000, PRINCETON, NJ, 08543-4000, US

(21) Appl. No.: 10/541,749

(22) PCT Filed: Jan. 8, 2004
(86) PCT No.: PCT/US04/00368

§ 371 Date: Mar. 3, 2006

(51) Int. Cl. C12Q 1/68; G01N 33/574

(52) U.S. Cl. 435/6; 435/7.23

(57) ABSTRACT

EGFR biomakers useful in a method for identifying a mammal that will respond therapeutically to a method of treating cancer comprising administering an EGFR modulator, wherein the method comprises (a) exposing the mammal to the EGFR modulator and (b) measuring in the mammal level of at least one biomaker, wherein a difference in the level in at least one biomaker measured in (b) compared to the level of the biomaker in a mammal that has not been exposed to the EGFR modulator indicates that the mammal will respond therapeutically to the method of treating cancer.

### FIELD OF THE INVENTION

[0001] The present invention relates generally to the field of pharmacogenomics, and more specifically to methods and procedures to determine sensitivity in patients to allow the development of individualized genetic profiles which aid in treating diseases and disorders based on patient response at a molecular level.

### BACKGROUND OF THE INVENTION

[0002] Cancer is a disease with extensive histoclinical heterogeneity. Although conventional histological and clinical features have been correlated to prognosis, the same apparent prognostic type of tumors varies widely in its responsiveness to therapy and consequent survival of the patient.

[0003] New prognostic and predictive markers, which would facilitate an individualization of therapy for each patient, are needed to accurately predict patient response to treatments, such as small molecule or biological molecule drugs, in the clinic. The problem may be solved by the identification of new parameters that could better predict the patient's sensitivity to treatment. The classification of patient samples is a crucial aspect of cancer diagnosis and treatment. The association of a patient's response to a treatment with molecular and genetic markers can open up new opportunities for treatment development in non-responding patients, or distinguish a treatment's indication among other treatment choices because of higher confidence in the efficacy. Further, the pre-selection of patients who are likely to respond well to a medicine, drug, or combination therapy may reduce the number of patients needed in a clinical study or accelerate the time needed to complete a clinical development program (M. Cockett et al., 2000, Current Opinion in Biotechnology, 11:602-609).

[0004] The ability to predict drug sensitivity in patients is particularly challenging because drug responses reflect not only properties intrinsic to the target cells, but also a host's metabolic properties. Efforts to use genetic information to predict drug sensitivity have primarily focused on individual genes that have broad effects, such as the multidrug resistance genes, mdr1 and mrp1 (P. Sonneveld, 2000, J. Intern. Med., 247:521-534).

[0005] The development of microarray technologies for large scale characterization of gene mRNA expression pattern has made it possible to systematically search for molecular markers and to categorize cancers into distinct subgroups not evident by traditional histopathological methods (J. Khan et al., 1998, Cancer Res., 58:5009-5013; A. A. Alizadeh et al., 2000, Nature, 403:503-511; M. Bittner et al., 2000, Nature, 406:536-540; J. Khan et al., 2001, Nature Medicine, 7(6):673-679; and T. R. Golub et al., 1999, Science, 286:531-537; U. Alon et al., 1999, Proc. Natl. Acad. Sci. USA, 96:6745-6750). Such technologies and molecular tools have made it possible to monitor the expression level of a large number of transcripts within a cell population at any given time (see, e.g., Schena et al., 1995, Science, 270:467-470; Lockhart et al., 1996, Nature Biotechnology, 14:1675-1680; Blanchard et al., 1996, Nature Biotechnology, 14:1649; U.S. Pat. No. 5,569,588 to Ashby et al.).

[0006] Recent studies demonstrate that gene expression information generated by microarray analysis of human tumors can predict clinical outcome (L. J. van't Veer et al., 2002, Nature, 415:530-536; M. West et al., 2001, Proc. Natl. Acad. Sci. USA, 98:11462-11467; T. Sorlie et al., 2001, Proc. Natl. Acad. Sci USA, 98:10869-10874; M. Shipp et al., 2002, Nature Medicine, 8(1):68-74). These findings bring hope that cancer treatment will be vastly improved by better predicting the response of individual tumors to therapy.

[0007] Needed are new and alternative methods and procedures to determine drug sensitivity in patients to allow the development of individualized genetic profiles which are necessary to treat diseases and disorders based on patient response at a molecular level.

### SUMMARY OF THE INVENTION

[0008] The invention provides methods and procedures for determining patient sensitivity to one or more Epidermal Growth Factor Receptor (EGFR) modulators. The invention also provides methods of determining or predicting whether an individual requiring therapy for a disease state such as cancer will or will not respond to treatment, prior to administration of the treatment, wherein the treatment comprises one or more EGFR modulators. The one or more EGFR modulators are compounds that can be selected from, for example, one or more EGFR specific ligands, one or more small molecule EGFR inhibitors, or one or more EGFR binding monoclonal antibodies.

[0009] In one aspect, the invention provides a method for identifying a mammal that will respond therapeutically to a method of treating cancer comprising administering an EGFR modulator, wherein the method comprises: (a) measuring in the mammal the level of at least one biomarker selected from the biomarkers of Table 4; (b) exposing the mammal to the EGFR modulator; (c) following the exposing of step (b), measuring in the mammal the level of the at least one biomarker, wherein a difference in the level of the at least one biomarker measured in step (c) compared to the level of the at least one biomarker measured in step (a) indicates that the mammal will respond therapeutically to said method of treating cancer.

[0010] As used herein, respond therapeutically refers to the alleviation or abrogation of the cancer. This means that the life expectancy of an individual affected with the cancer will be increased or that one or more of the symptoms of the cancer will be reduced or ameliorated. The term encompasses a reduction in cancerous cell growth or tumor volume. Whether a mammal responds therapeutically can be measured by many methods well known in the art, such as PET imaging.

[0011] The at least one biomarker can also be selected from the biomarkers of Table 5. The mammal can be, for example, a human, rat, mouse, dog rabbit, pig sheep, cow, horse, cat, primate, or monkey.

[0012] The method of the invention can be, for example, an in vitro method and wherein the at least one biomarker is measured in at least one mammalian biological sample from the mammal. The biological sample can comprise, for example, at least one of whole fresh blood, peripheral blood mononuclear cells, frozen whole blood, fresh plasma, frozen plasma, urine, saliva, skin, hair follicle, or tumor tissue.

[0013] In another aspect, the invention provides a method for identifying a mammal that will respond therapeutically to a method of treating cancer comprising administering an EGFR modulator, wherein the method comprises: (a) exposing the mammal to the EGFR modulator; (b) following the exposing of step (a), measuring in the mammal the level of the at least one biomarker selected from the biomarkers of Table 4, wherein a difference in the level of the at least one biomarker measured in step (b), compared to the level of the biomarker in a mammal that has not been exposed to said EGFR modulator, indicates that the mammal will respond therapeutically to said method of treating cancer.

[0014] In yet another aspect, the invention provides a method for testing or predicting whether a mammal will respond therapeutically to a method of treating cancer comprising administering an EGFR modulator, wherein the method comprises: (a) measuring in the mammal the level of at least one biomarker selected from the biomarkers of Table 4; (b) exposing the mammal to the EGFR modulator; (c) following the exposing of step (b), measuring in the mammal the level of the at least one biomarker, wherein a difference in the level of the at least one biomarker measured in step (c) compared to the level of the at least one biomarker measured in step (a) indicates that the mammal will respond therapeutically to said method of treating cancer.

[0015] In another aspect, the invention provides a method for determining whether a compound inhibits EGFR activity in a mammal, comprising: (a) exposing the mammal to the compound; and (b) following the exposing of step (a), measuring in the mammal the level of at least one biomarker selected from the biomarkers of Table 4, wherein a difference in the level of said biomarker measured in step (b), compared to the level of the biomarker in a mammal that has not been exposed to said compound, indicates that the compound inhibits EGFR activity in the mammal.

[0016] In yet another aspect, the invention provides a method for determining whether a mammal has been exposed to a compound that inhibits EGFR activity, comprising (a) exposing the mammal to the compound; and (b) following the exposing of step (a), measuring in the mammal the level of at least one biomarker selected from the biomarkers of Table 4, wherein a difference in the level of said biomarker measured in step (b), compared to the level of the biomarker in a mammal that has not been exposed to said compound, indicates that the mammal has been exposed to a compound that inhibits EGFR activity.

[0017] In another aspect, the invention provides a method for determining whether a mammal is responding to a compound that inhibits EGFR activity, comprising (a) exposing the mammal to the compound; and (b) following the exposing of step (a), measuring in the mammal the level of at least one biomarker selected from the biomarkers of Table 4, wherein a difference in the level of said biomarker measured in step (b), compared to the level of the biomarker in a mammal that has not been exposed to said compound, indicates that the mammal is responding to the compound that inhibits EGFR activity.

[0018] As used herein, “responding” encompasses responding by way of a biological and cellular response, as well as a clinical response (such as improved symptoms, a therapeutic effect, or an adverse event), in a mammal The invention also provides an isolated biomarker selected from the biomarkers of Table 4. The biomarkers of the invention comprise sequences selected from the nucleotide and amino acid sequences provided in Table 4 and the Sequence Listing, as well as fragments and variants thereof.

[0019] The invention also provides a biomarker set comprising two or more biomarkers selected from the biomarkers of Table 4.

[0020] The invention also provides kits for determining or predicting whether a patient would be susceptible or resistant to a treatment that comprises one or more EGFR modulators. The patient may have a cancer or tumor such as, for example, a colon cancer or tumor.

[0021] In one aspect, the kit comprises a suitable container that comprises one or more specialized microarrays of the invention, one or more EGFR modulators for use in testing cells from patient tissue specimens or patient samples, and instructions for use. The kit may further comprise reagents or materials for monitoring the expression of a biomarker set at the level of mRNA or protein.

[0022] In another aspect, the invention provides a kit comprising two or more biomarkers selected from the biomarkers of Table 4.

[0023] In yet another aspect, the invention provides a kit comprising at least one of an antibody and a nucleic acid for detecting the presence of at least one of the biomarkers selected from the biomarkers of Table 4. In one aspect, the kit further comprises instructions for determining whether or not a mammal will respond therapeutically to a method of treating cancer comprising administering a compound that inhibits EGFR activity. In another aspect, the instructions comprise the steps of (a) measuring in the mammal the level of at least one biomarker selected from the biomarkers of Table 4, (b) exposing the mammal to the compound, (c) following the exposing of step (b), measuring in the mammal the level of the at least one biomarker, wherein a difference in the level of the at least one biomarker measured in step (c) compared to the level of the at least one biomarker measured in step (a) indicates that the mammal will respond therapeutically to said method of treating cancer.

[0024] The invention also provides screening assays for determining if a patient will be susceptible or resistant to treatment with one or more EGFR modulators.

[0025] The invention also provides a method of monitoring the treatment of a patient having a disease treatable by one or more EGFR modulators.

[0026] The invention also provides individualized genetic profiles which are necessary to treat diseases and disorders-based on patient response at a molecular level.

[0027] The invention also provides specialized microarrays, e.g., oligonucleotide microarrays or cDNA microarrays, comprising one or more biomarkers having expression profiles that correlate with either sensitivity or resistance to one or more EGFR modulators. The invention also provides antibodies, including polyclonal or monoclonal, directed against one or more biomarkers of the invention.

[0028] The invention will be better understood upon a reading of the detailed description of the invention when considered in connection with the accompanying figures.

### BRIEF DESCRIPTION OF THE FIGURES

[0029] FIG. 1 illustrates a EGFR biomarker identification and prioritization strategy.

[0030] FIG. 2A illustrates the RT-PCR results for EGFR in thirty one colon cancer cell lines to identify cell lines which do not have significant mRNA expression of EGFR.

[0031] FIG. 2B illustrates the IC₅₀ profile for twenty two colon cancer cell lines with an EGFR inhibitor compound, and determination of sensitive and resistant cell lines.

### DETAILED DESCRIPTION OF THE INVENTION

[0032] The invention provides biomarkers that respond to the modulation of a specific signal transduction pathway and also correlate with EGFR modulator sensitivity or resistance. These biomarkers can be employed for predicting response to one or more EGFR modulators. In one aspect, the biomarkers of the invention are those provided in Table 4 and the Sequence Listing, including both polynucleotide and polypeptide sequences.

[0033] The biomarkers were determined by an in vitro assay employing microarray technology to monitor simultaneously the expression pattern of thousands of discrete genes in untreated cells, whose response to the modulation of a signal transduction pathway, in particular the EGFR pathway, was tested on untreated cells whose sensitivity to EGFR modulators was tested. The biomarkers have expression levels in the cells that are dependent on the activity of the EFGR signal transduction pathway and that are also highly correlated with EGFR modulator sensitivity exhibited by the cells. Biomarkers serve as useful molecular tools for predicting a response to EGFR modulators, preferably biological molecules, small molecules, and the like that affect EGFR kinase activity via direct or indirect inhibition or antagonism of EGFR kinase function or activity.

EGFR Modulators

[0034] As used herein, the term “EGFR modulator” is intended to mean a compound or drug that is a biological molecule or a small molecule that directly or indirectly modulates EGFR activity or the EGFR signal transduction pathway. Thus, compounds or drugs as used herein is intended to include both small molecules and biological molecules. Direct or indirect modulation includes activation or inhibition of EGFR activity or the EGFR signal transduction pathway. In one aspect, inhibition refers to inhibition of the binding of EGFR to an EGFR ligand such as, for example, EGF. In another aspect, inhibition refers to inhibition of the kinase activity of EGFR.

[0035] EGFR modulators include, for example, EGFR specific ligands, small molecule EGFR inhibitors, and EGFR monoclonal antibodies. In one aspect, the EGFR modulator inhibits EGFR activity and/or inhibits the EGFR signal transduction pathway. In another aspect, the EGFR modulator is an EGFR antibody that inhibits EGFR activity and/or inhibits the EGFR signal transduction pathway.

[0036] EGFR modulators include biological molecules or small molecules. Biological molecules include all lipids and polymers of monosaccharides, amino acids, and nucleotides having a molecular weight greater than 450. Thus, biological molecules include, for example, oligosaccharides and polysaccharides; oligopeptides, polypeptides, peptides, and proteins; and oligonucleotides and polynucleotides. Oligonucleotides and polynucleotides include, for example, DNA and RNA.

[0037] Biological molecules further include derivatives of any of the molecules described above. For example, derivatives of biological molecules include lipid and glycosylation derivatives of oligopeptides, polypeptides, peptides, and proteins.

[0038] Derivatives of biological molecules further include lipid derivatives of oligosaccharides and polysaccharides, e.g., lipopolysaccharides. Most typically, biological molecules are antibodies, or functional equivalents of antibodies. Functional equivalents of antibodies have binding characteristics comparable to those of antibodies, and inhibit the growth of cells that express EGFR. Such functional equivalents include, for example, chimerized, humanized, and single chain antibodies as well as fragments thereof.

[0039] Functional equivalents of antibodies also include polypeptides with amino acid sequences substantially the same as the amino acid sequence of the variable or hypervariable regions of the antibodies. An amino acid sequence that is substantially the same as another sequence, but that differs from the other sequence by means of one or more substitutions, additions, and/or deletions, is considered to be an equivalent sequence. Preferably, less than 50%, more preferably less than 25%, and still more preferably less than 10%, of the number of amino acid residues in a sequence are substituted for, added to, or deleted from the protein.

[0040] The functional equivalent of an antibody is preferably a chimerized or humanized antibody. A chimerized antibody comprises the variable region of a non-human antibody and the constant region of a human antibody. A humanized antibody comprises the hypervariable region (CDRs) of a non-human antibody. The variable region other than the hypervariable region, e.g., the framework variable region, and the constant region of a humanized antibody are those of a human antibody.

[0041] Suitable variable and hypervariable regions of non-human antibodies may be derived from antibodies produced by any non-human mammal in which monoclonal antibodies are made. Suitable examples of mammals other than humans include, for example, rabbits, rats, mice, horses, goats, or primates.

[0042] Functional equivalents further include fragments of antibodies that have binding characteristics that are the same as, or are comparable to, those of the whole antibody. Suitable fragments of the antibody include any fragment that comprises a sufficient portion of the hypervariable (i.e., complementarity determining) region to bind specifically, and with sufficient affinity, to EGFR tyrosine kinase to inhibit growth of cells that express such receptors.

[0043] Such fragments may, for example, contain one or both Fab fragments or the F(ab′)₂ fragment. Preferably, the antibody fragments contain all six complementarity determining regions of the whole antibody, although functional fragments containing fewer than all of such regions, such as three, four, or five CDRs, are also included.

[0044] In one aspect, the fragments are single chain antibodies, or Fv fragments. Single chain antibodies are polypeptides that comprise at least the variable region of the heavy chain of the antibody linked to the variable region of the light chain, with or without an interconnecting linker. Thus, Fv fragment comprises the entire antibody combining site. These chains may be produced in bacteria or in eukaryotic cells.

[0045] The antibodies and functional equivalents may be members of any class of immunoglobulins, such as IgG, IgM, IgA, IgD, or IgE, and the subclasses thereof. In one aspect, the antibodies are members of the IgG1 subclass. The functional equivalents may also be equivalents of combinations of any of the above classes and subclasses.

[0046] In one aspect, EGFR antibodies can be selected from chimerized, humanized, fully human, and single chain antibodies derived from the murine antibody 225 described in U.S. Pat. No. 4,943,533 to Mendelsohn et al. In one aspect, the 225 derived antibodies have the following hypervariable (CDR) regions of the light and heavy chain, wherein the amino acid sequences are indicated below the nucleotide sequences:

[0047] Heavy Chain Hypervarlible Regions (VH):

| | |
|---|---|
| CDR1 | |
| AACTATGGTGTACAC | (SEQ ID NO: 179) |
| N Y G V H | (SEQ ID NO: 180) |
| CDR2 | |
| GTGATATGGAGTGGTGGAAACACAGACTATAATACACCTTTCACATCC | (SEQ ID NO: 181) |
| V I W S G G N T D Y N T P F T S | (SEQ ID NO: 182) |
| CDR3 | |
| GCCCTCACCTACTATGATTACGAGTTTGCTTAC | (SEQ ID NO: 183) |
| A L T Y Y D Y E F A Y | (SEQ ID NO: 184) |
| LIGHT CHAIN HYPERVARIABLE REGIONS (VL): | |
| CDR1 | |
| AGGGCCAGTCAGAGTATTGGCACAAACATACAC | (SEQ ID NO: 185) |
| R A S Q S I G T N I H | (SEQ ID NO: 186) |
| CDR2 | |
| GCTTCTGAGTCTATCTCT | (SEQ ID NO: 187) |
| A S E S I S | (SEQ ID NO: 188) |
| CDR3 | |
| CAACAAAATAATAACTGGCCAACCACG | (SEQ ID NO: 189) |
| Q Q N N N W P T T | (SEQ ID NO: 190) |

In another aspect, the EGFR antibody can be selected from the antibodies described in U.S. Pat. No. 6,235,883 to Jakobovits et al., U.S. Pat. No. 5,558,864 to Bendi et al., and U.S. Pat. No. 5,891,996 to Mateo de Acosta del Rio et al.

[0048] In addition to the biological molecules discussed above, the EGFR modulators useful in the invention may also be small molecules. Any molecule that is not a biological molecule is considered herein to be a small molecule. Some examples of small molecules include organic compounds, organometallic compounds, salts of organic and organometallic compounds, saccharides, amino acids, and nucleotides. Small molecules further include molecules that would otherwise be considered biological molecules, except their molecular weight is not greater than 450. Thus, small molecules may be lipids, oligosaccharides, oligopeptides, and oligonucleotides and their derivatives, having a molecular weight of 450 or less.

[0049] It is emphasized that small molecules can have any molecular weight. They are merely called small molecules because they typically have molecular weights less than 450. Small molecules include compounds that are found in nature as well as synthetic compounds. In one embodiment, the EGFR modulator is a small molecule that inhibits the growth of tumor cells that express EGFR. In another embodiment, the EGFR modulator is a small molecule that inhibits the growth of refractory tumor cells that express EGFR.

[0050] Numerous small molecules have been described as being useful to inhibit EGFR. For example, U.S. Pat. No. 5,656,655 to Spada et al. discloses styryl substituted heteroaryl compounds that inhibit EGFR. The heteroaryl group is a monocyclic ring with one or two heteroatoms, or a bicyclic ring with 1 to about 4 heteroatoms, the compound being optionally substituted or polysubstituted.

[0051] U.S. Pat. No. 5,646,153 to Spada et al. discloses bis mono and/or bicyclic aryl heteroaryl, carbocyclic, and heterocarbocyclic compounds that inhibit EGFR.

[0052] U.S. Pat. No. 5,679,683 to Bridges et al. discloses tricyclic pyrimidine compounds that inhibit the EGFR. The compounds are fused heterocyclic pyrimidine derivatives described at column 3, line 35 to column 5, line 6.

[0053] U.S. Pat. No. 5,616,582 to Barker discloses quinazoline derivatives that have receptor tyrosine kinase inhibitory activity.

[0054] Fry et al., Science 265, 1093-1095 (1994) in FIG. 1 discloses a compound having a structure that inhibits EGFR.

[0055] Osherov et al. disclose tyrphostins that inhibit EGFR/HER1 and HER 2, particularly those in Tables I, II, III, and IV.

[0056] U.S. Pat. No. 5,196,446 to Levitzki et al. discloses heteroarylethenediyl or heteroarylethendeiylaryl compounds that inhibit EGFR, particularly from column 2, line 42 to column 3, line 40.

[0057] Panek et al., Journal of Pharmacology and Experimental Therapeutics 283, 1433-1444 (1997) discloses a compound identified as PD166285 that inhibits the EGFR, PDGFR, and FGFR families of receptors. PD166285 is identified as 6-(2,6-dichlorophenyl)-2-(4-(2-diethylaminoethyoxy)phenylamino)-8-methyl-8H-pyrido(2,3-d)pyrimidin-7-one having the structure shown in FIG. 1 on page 1436.

Biomarkers and Biomarker Sets

[0058] The invention includes individual biomarkers and biomarker sets having both diagnostic and prognostic value in disease areas in which signaling through EGFR or the EGFR pathway is of importance, e.g., in cancers or tumors, in immunological disorders, conditions or dysfunction, or in disease states in which cell signaling and/or cellular proliferation controls are abnormal or aberrant. The biomarker sets comprise a plurality of biomarkers such as, for example, a plurality of the biomarkers provided in Table 4 below, that highly correlate with resistance or sensitivity to one or more EGFR modulators.

[0059] The biomarker sets of the invention enable one to predict or reasonably foretell the likely effect of one or more EGFR modulators in different biological systems or for cellular responses. The biomarker sets can be used in in vitro assays of EGFR modulator response by test cells to predict in vivo outcome. In accordance with the invention, the various biomarker sets described herein, or the combination of these biomarker sets with other biomarkers or markers, can be used, for example, to predict how patients with cancer might respond to therapeutic intervention with one or more EGFR modulators.

[0060] A biomarker set of cellular gene expression patterns correlating with sensitivity or resistance of cells following exposure of the cells to one or more EGFR modulators provides a useful tool for screening one or tumor samples before treatment with the EGFR modulator. The screening allows a prediction of cells of a tumor sample exposed to one or more EGFR modulators, based on the expression results of the biomarker set, as to whether or not the tumor, and hence a patient harboring the tumor, will or will not respond to treatment with the EGFR modulator.

[0061] The biomarker or biomarker set can also be used as described herein for monitoring the progress of disease treatment or therapy in those patients undergoing treatment for a disease involving an EGFR modulator.

[0062] The biomarkers serve as targets for the development of therapies for disease treatment Such targets may be particularly applicable to treatment of breast disease, such as breast cancers or tumors. Indeed, because these biomarkers are differentially expressed in sensitive and resistant cells, their expression patterns are correlated with relative intrinsic sensitivity of cells to treatment with EGFR modulators. Accordingly, the biomarkers highly expressed in resistant cells may serve as targets for the development of new therapies for the tumors which are resistant to EGFR modulators, particularly EGFR inhibitors.

Microarrays

[0063] The invention also includes specialized microarrays, e.g., oligonucleotide microarrays or cDNA microarrays, comprising one or more biomarkers, showing expression profiles that correlate with either sensitivity or resistance to one or more EGFR modulators. Such microarrays can be employed in in vitro assays for assessing the expression level of the biomarkers in the test cells from tumor biopsies, and determining whether these test cells are likely to be resistant or sensitive to EGFR modulators. For example, a specialized microarray can be prepared using all the biomarkers, or subsets thereof, as described herein and shown in Table 4. Cells from a tissue or organ biopsy can be isolated and exposed to one or more of the EGFR modulators. Following application of nucleic acids isolated from both untreated and treated cells to one or more of the specialized microarrays, the pattern of gene expression of the tested cells can be determined and compared with that of the biomarker pattern from the control panel of cells used to create the biomarker set on the microarray. Based upon the gene expression pattern results from the cells that underwent testing, it can be determined if the cells show a resistant or a sensitive profile of gene expression. Whether or not the tested cells from a tissue or organ biopsy will respond to one or more of the EGFR modulators and the course of treatment or therapy can then be determined or evaluated based on the information gleaned from the results of the specialized microarray analysis.

Antibodies

[0064] The invention also includes antibodies, including polyclonal or monoclonal, directed against one or more of the polypeptide biomarkers. Such antibodies can be used in a variety of ways, for example, to purify, detect, and target the biomarkers of the invention, including both in vitro and in vivo diagnostic, detection, screening, and/or therapeutic methods.

Kits

[0065] The invention also includes kits for determining or predicting whether a patient would be susceptible or resistant to a treatment that comprises one or more EGFR modulators. The patient may have a cancer or tumor such as, for example, a breast cancer or tumor. Such kits would be useful in a clinical setting for use in testing a patient's biopsied tumor or cancer samples, for example, to determine or predict if the patient's tumor or cancer will be resistant or sensitive to a given treatment or therapy with an EGFR modulator. The kit comprises a suitable container that comprises: one or more microarrays, e.g., oligonucleotide microarrays or cDNA microarrays, that comprise those biomarkers that correlate with resistance and sensitivity to EGFR modulators, particularly EGFR inhibitors; one or more EGFR modulators for use in testing cells from patient tissue specimens or patient samples; and instructions for use. In addition, kits contemplated by the invention can further include, for example, reagents or materials for monitoring the expression of biomarkers of the invention at the level of mRNA or protein, using other techniques and systems practiced in the art such as, for example, RT-PCR assays, which employ primers designed on the basis of one or more of the biomarkers described herein, immunoassays, such as enzyme linked immunosorbent assays (ELISAs), immunoblotting, e.g., Western blots, or in situ hybridization, and the like, as further described herein.

Application of Biomarkers and Biomarker Sets

[0066] The biomarkers and biomarker sets may be used in different applications. Biomarker sets can be built from any combination of biomarkers listed in Table 4 to make predictions about the likely effect of any EGFR modulator in different biological systems. The various biomarkers and biomarker sets described herein can be used, for example, as diagnostic or prognostic indicators in disease management, to predict how patients with cancer might respond to therapeutic intervention with compounds that modulate the EGFR, and to predict how patients might respond to therapeutic intervention that modulates signaling through the entire EGFR regulatory pathway.

[0067] While the data described herein were generated in cell lines that are routinely used to screen and identify compounds that have potential utility for cancer therapy, the biomarkers have both diagnostic and prognostic value in other diseases areas in which signaling through EGFR or the EGFR pathway is of importance, e.g., in immunology, or in cancers or tumors in which cell signaling and/or proliferation controls have gone awry.

[0068] In the examples described below, the sensitivity and resistance classifications in the twenty two colon cell lines were similar for the two EGFR modulators tested. Therefore, the biomarkers of the invention are expected to have both diagnostic and prognostic value for other compounds that modulate EGFR or the EGFR signaling pathways.

[0069] Those having skill in the pertinent art will appreciate that the EGFR signaling pathway is used and functional in cell types other than cell lines of colon tissue. Therefore, the described biomarkers are expected to have utility for predicting drug sensitivity or resistance to compounds that interact with or inhibit the EGFR activity in cells from other tissues or organs associated with a disease state, or cancers or tumors derived from other tissue types. Non-limiting examples of such cells, tissues and organs include breast, colon, lung, prostate, testes, ovaries, cervix, esophagus, pancreas, spleen, liver, kidney, stomach, lymphocytic and brain, thereby providing a broad and advantageous applicability to the biomarkers described herein. Cells for analysis can be obtained by conventional procedures as known in the art, for example, tissue biopsy, aspiration, sloughed cells, e.g., colonocytes, clinical or medical tissue or cell sampling procedures.

[0070] In accordance with the invention, cells from a patient tissue sample, e.g., a tumor or cancer biopsy, can be assayed to determine the expression pattern of one or more biomarkers prior to treatment with one or more EGFR modulators. Success or failure of a treatment can be determined based on the biomarker expression pattern of the cells from the test tissue (test cells), e.g., tumor or cancer biopsy, as being relatively similar or different from the expression pattern of a control set of the one or more biomarkers. Thus, if the test cells show a biomarker expression profile which corresponds to that of the biomarkers in the control panel of cells which are sensitive to the EGFR modulator, it is highly likely or predicted that the individual's cancer or tumor will respond favorably to treatment with the EGFR modulator. By contrast, if the test cells show a biomarker expression pattern corresponding to that of the biomarkers of the control panel of cells which are resistant to the EGFR modulator, it is highly likely or predicted that the individual's cancer or tumor will not respond to treatment with the EGFR modulator.

[0071] The invention also provides a method of monitoring the treatment of a patient having a disease treatable by one or more EGFR modulators. The isolated test cells from the patient's tissue sample, e.g., a tumor biopsy or tumor sample, can be assayed to determine the expression pattern of one or more biomarkers before and after exposure to an EGFR modulator wherein, preferably, the EGFR modulator is an EGFR inhibitor. The resulting biomarker expression profile of the test cells before and after treatment is compared with that of one or more biomarkers as described and shown herein to be highly expressed in the control panel of cells that are either resistant or sensitive to an EGFR modulator. Thus, if a patient's response is sensitive to treatment by an EGFR modulator, based on correlation of the expression profile of the one or biomarkers, the patient's treatment prognosis can be qualified as favorable and treatment can continue. Also, if, after treatment with an EGFR modulator, the test cells don't show a change in the biomarker expression profile corresponding to the control panel of cells that are sensitive to the EGFR modulator, it can serve as an indicator that the current treatment should be modified, changed, or even discontinued. This monitoring process can indicate success or failure of a patient's treatment with an EGFR modulator and such monitoring processes can be repeated as necessary or desired.

[0072] The biomarkers of the invention can be used to predict an outcome prior to having any knowledge about a biological system. Essentially, a biomarker can be considered to be a statistical tool. Biomarkers are useful primarily in predicting the phenotype that is used to classify the biological system. In an embodiment of the invention, the goal of the prediction is to classify cancer cells as having an active or inactive EGFR pathway. Cancer cells with an inactive EGFR pathway can be considered resistant to treatment with an EGFR modulator. An inactive EGFR pathway is defined herein as a non-significant expression of the EGFR or by a classification as “resistant” or “sensitive” based on the IC₅₀ value of each colon cell line to a compound (EGFR inhibitor compound BMS-461453) exemplified herein.

[0073] A number of the biomarker described herein are known to be regulated by EGFR, e.g., mucin 2 (J Biol Chem. 2002 Aug. 30; 277(35):32258-67). Another biomarker, betacellulin, is know to be an EGFR ligand (Biochem Biophys Res Commun. 2002 Jun. 28; 294(5):1040-6). A functional relationship of the top biomarkers to the EGFR is expected, since biomarkers that contribute to high biomarker accuracy are likely to play a functional role in the pathway that is being modulated. For example, Perception therapy (i.e., antibody that binds to the Her2 receptor and prevents function via internalization) is indicated when the Her2 gene is overexpressed. It is unlikely that a therapy will have any therapeutic effect if the target enzyme is not expressed.

[0074] However, although the complete function of all of the biomarkers are not currently known, some of the biomarkers are likely to be directly or indirectly involved in the EGFR signaling pathway. In addition, some of the biomarkers may function in the metabolic or other resistance pathways specific to the EGFR modulators tested. Notwithstanding, knowledge about the function of the biomarkers is not a requisite for determining the accuracy of a biomarker according to the practice of the invention.

Discovery of Biomarkers

[0075] An approach has been discovered in which biomarkers were identified whose expression patterns, in a subset of cell lines, correlated to and can be used as an in vitro marker of cellular response to treatment or therapy with one compound, or with a combination or series of compounds, that are known to inhibit or activate the function of a protein, enzyme, or molecule (e.g., a receptor) that is directly or indirectly involved in cell proliferation, cell responses to external stimuli, (such as ligand binding), or signal transduction, e.g., a receptor tyrosine kinase. Preferred are antagonists or inhibitors of the function of a given protein, e.g., a receptor tyrosine kinase.

[0076] Two analytical strategies were deployed to discover biomarkers useful for predicting the sensitivity or resistance of cancer cells to treatment with one or more EGFR modulators. FIG. 1 illustrates the EGFR biomarker identification and prioritization strategy. In one strategy, the mRNA expression level of EGFR was used to identify six colon cancer cell lines with, inferred from the mRNA expression level, no significant presence of the EGFR protein and hence no significant activity of the EGFR pathway (FIG. 2A). In subsequent analyses, biomarkers were identified that had no significant mRNA expression level in the six cell lines and no inferred presence of the EGFR protein. Further, it was required that these biomarkers would have a significant mRNA expression level in at least six other cell lines.

[0077] In a second strategy, an EGFR specific tyrosine kinase inhibitor compound was used to determine compound sensitivity in a panel of twenty two colon cancer cell lines following exposure of the cells to the compound. Some of the cell lines were determined to be resistant to treatment with the inhibitor compound, while others were determined to be sensitive to the inhibitor (FIG. 2B). A subset of the cell lines examined provided an expression pattern or profile of biomarkers that correlated to a response by the cells to the EGFR inhibitor compound as well as the absence of significant EGFR expression as thus could serve as biomarkers.

[0078] By combining the use of EGFR co-regulation studies in tumor cells with experimental studies in cultured cells as a model of in vivo effects, the invention advantageously focuses on cell-intrinsic properties that are exposed in cell culture to identify biomarkers that predict compound sensitivity and resistance. The discovery and identification of biomarkers in tumor cells and cell lines assayed in vitro can be used to predict responses to one or more EGFR modulators in vivo and, thus, can be extended to clinical situations in which the same biomarkers are used to predict patients' responses to one or more EGFR modulators and treatments comprising one or more EGFR modulators.

[0079] As described in the examples below, oligonucleotide microarrays were used to measure the expression levels of over 44,792 probe sets in a panel of thirty one untreated colon cancer cell lines for which the expression status of the EGFR and the drug sensitivity to EGFR inhibitor compounds was determined. This analysis was performed to determine whether the gene expression signatures of untreated cells were sufficient for the prediction of sensitivity of the disease to inhibition of the EGFR by small molecule or biological molecule compounds. Through data analysis, biomarkers were identified whose expression levels were found to be highly counter-correlated with the status of the EGFR and correlated with the drug sensitivity. In addition, the treatment of cells with a small molecule EGFR inhibitor also provided gene expression signatures predictive of sensitivity to the compound.

[0080] The means of performing the gene expression and biomarker identification analyses embraced by the invention is described in further detail and without limitation below.

IC₅₀ Determination and Phenotype Classification Based on Sensitivity of Twenty-Two Colon Cancer Cell Lines to EGFR Inhibitor Compounds

[0081] Twenty two colon cell lines were treated with a small molecule EGFR inhibitor (BMS-461453) to determine the individual IC₅₀ value. The IC₅₀ for each cell line was assessed by MTS assays. The average IC₅₀ values along with standard deviations were calculated from two to five individual determinations for each cell line. As shown in FIG. 2B, a 4-fold variation in the IC₅₀ values was observed for the small molecule EGFR inhibitor among the 22 colon cancer cell lines. The IC₅₀ unit is μM.

[0082] All cell lines with at least a 1.75 fold lower IC₅₀ than the most resistant cell lines were considered to be sensitive to treatment with the small molecule EGFR inhibitor. FIG. 2B represents the resistance/sensitivity classifications of the twenty-two colon cell lines to the small molecule EGFR inhibitor. Five cell lines were classified as sensitive and seventeen cell lines as resistant.

Description of the Strategy for Identifying Biomarkers

[0083] Biomarkers were discovered based on two criteria: (i) the correlation of their mRNA expression level to the expression of EGFR in cell lines with insignificant EGFR expression and (ii) the correlation of the IC₅₀ values for the small molecule EGFR inhibitor BMS-461453 with gene expression levels.

[0084] For each of these two biomarker selection strategies, two independent “discovery” probe set lists were established by using statistical filters with different stringency levels to identify genes whose expression correlated with either EGFR status or IC₅₀ value. These statistical methods are described below and resulted in four discovery probe set lists: EGFR-A and EGFR-B (correlation with no significant EGFR expression) and IC-50-A, IC-50-B (correlation with IC₅₀ expression), the A-lists containing probe sets selected by more stringent conditions. To then establish two biomarker probe set lists, probe sets that appeared in both EGFR-A and IC-50 B were selected (Biomarker Probe Set List A, Table 2) and probe sets that appeared in both EGFR-B and IC-50-A were selected (Biomarker Probe Set List B, Table 3).

Identifying Genes that Significantly Correlate with EGFR Status Classification

[0085] RT-PCR expression data for EGFR were obtained from thirty one colon cancer cell lines and six cell lines with a significantly lower expression level of EGFR compared to the other cell lines were identified as described in Example 1 below. (FIG. 2A). Expression profiling data of 44,792 probe sets represented on the HG-U133 array set for all Dirty one untreated colon cancer cell lines were obtained and analyzed for the identification of probe sets which would be correlated with the above described six cell lines with no significant mRNA expression of EGFR. For the discovery probe set list EGFR-A, all probe sets which were judged to be absent by the Affymetrix Mas 5.0 software in six of the six colon cancer cell lines with significantly lower expression of EGFR were identified. Second, it was required that these probe sets would be judged to be present in at least six cell lines of the twenty five cell lines classified as having significant mRNA expression of the EGFR This analytical strategy resulted in the identification of 280 probe sets that could be analyzed in comparison to the discovery probe set list IC-50-B.

[0086] The discovery probe set list EGFR-B was generated by selecting all probe sets which were judged to be absent by the Affymetrix Mas 5.0 software in five of the six colon cancer cell lines with significantly lower expression of EGFR and which would be present in at least six cell lines of the twenty five cell lines classified as having significant mRNA expression of the EGFR. Discovery probe set list EGR-B contains 1,852 probe sets (1133A: 876; U133B: 976).

Identifying Genes that Significantly Correlate with Drug Resistance/Sensitivity Classification

[0087] Expression profiling data of 44,792 probe sets represented on the HG-U133 array set for twenty two untreated colon cell lines were obtained and preprocessed as described in Example 1 below. These data were analyzed using the Student's TTEST to identify genes whose expression patterns were strongly correlated with the drug resistance/sensitivity classification. Table 1 provides the resistance/sensitivity phenotype classification of the twenty two colon cell lines for the EGFR antagonist BMS-461453 based on the IC₅₀ results. The mean IC₅₀ values along with standard deviations (SD) were calculated from 2 to 5 individual determinations for each cell line as shown. The mean IC₅₀ across the twenty two colon cell lines for BMS-461453 was calculated and used to normalize the IC₅₀ data for each cell line. All cell lines with at least a 1.75 fold lower IC₅₀ than the most resistant cell lines were considered to be sensitive to treatment with BMS-5461453. The cell lines designated with an asterisk are defined as being sensitive to the drug treatment.

TABLE 1
Resistance/Sensitivity Phenotype Classification of Twenty Two Colon
Cell Lines

| Cell lines | IC₅₀ (μM) | SD |
|---|---|---|
| CCD_33C0* | 2 | 1.28 |
| LOVO* | 2.3 | 2.28 |
| LS174T* | 3.5 | 1.93 |
| Caco2* | 5.5 | 3.97 |
| SW403* | 5.7 | 4.94 |
| CCD18Co | 7.1 | 3.84 |
| SW837 | 7.2 | 3.30 |
| Sk-Co-1 | 9 | 2.02 |
| MIP | 9.7 | 0.52 |
| SW1417 | 10 | 0.00 |
| HT-29 | 10 | 0.00 |
| T84 | 10 | 0.00 |
| CX-1 | 10 | 0.00 |
| Colo-205 | 10 | 0.00 |
| Colo-201 | 10 | 0.00 |
| Colo320HSR | 10 | 0.00 |
| HCT8 | 10 | 0.00 |
| Colo320DM | 10 | 0.00 |
| SW480 | 10 | 0.00 |
| HCT116 | 10 | 0.00 |
| SW620 | 10 | 0.00 |
| HCT116S542 | 10 | 0.00 |

An “idealized expression pattern” corresponds to a gene that is uniformly high in one class (e.g., sensitive) and uniformly low in the other (e.g., resistant). Initially, a Student TTEST was performed in which a T value was obtained for each probe set. Once a T value was generated, its corresponding confidence value (P) was found on a standard table of significance. The confidence value is a measure of the probability to observe a certain mean expression difference between two groups by chance alone and is obtained using the following formula:
T(g·c)=(X₁−X₂)/(var₁/n₁+var₂/n₂)^{1/2}
wherein,
T(g,c) represents the T value between expression for gene g and the sensitivity/resistance classification c;
X₁ represents mean gene expression level of samples in class 1;
X₂ represents mean gene expression level of samples in class 2;
var₁ represents variance of gene expression for samples in class 1;
var₂ represents variance of gene expression for samples in class 2;
n₁ represents number of samples in class 1;
n₂ represents number of samples in class 2; and
corresponding confidence value (P) for T values are obtained from a standard table of significance.

[0088] To generate discovery probe set list IC-50-B, a confidence value of 0.05 or lower was used as the cut off for probe sets to be included in the list. Discovery probe set list IC-50-B contains 5,050 probe sets (U133A: 2,498; U133B: 2,552).

[0089] Discovery probe set list IC-50-A was generated using the Pearson correlation coefficient (a dimensionless index that ranges from −1.0 to 1.0). This value was calculated by treating the IC₅₀ data as continuous variables and by utilizing a linear regression model to correlate gene expression levels with IC₅₀ values for twenty-two colon cell lines. Probe sets with a correlation coefficient less than −0.5 were selected (p<0.02), a total of 902 probe sets (U133A: 467; U133B: 435).

[0090] Finally, two separate biomarker probe set lists were generated, biomarker probe set lists A and B, by identifying probe sets which were present in EGFR-A and IC-50-B (Biomarker Probe Set List A) (Table 2) or were present in EGFR-B and IC-50-A (Biomarker Probe Set List B) (Table 3).

[0091] The biomarker probe set list A (Table 2) contains a total of 74 probe sets (U133A: 43; U133B: 31) and provides the polynucleotides identified to be biomarkers of EGFR antagonist sensitivity employing strategy A. With strategy A, polynucleotides were required to satisfy a stringent criteria for EGFR status coregulation and a less stringent condition for correlation to IC₅₀ values. Namely, the polynucleotides had to be called absent by the Affymetrix software in six out of the six cell lines with lowest expression of EGFR and be differentially expressed in the sensitive and resistance cell lines with a P value equal to or less than 0.05.

TABLE 2
Biomarker Probe Set List A

| | | Affymetrix |
|---|---|---|
| Unigene Title | Affymetrix Description | probe set |
| hemoglobin, | gb: BC005931.1 /DEF = Homo sapiens, | 211745_x_at |
| alpha 1 | hemoglobin, alpha 2, clone MGC: 14541, mRNA, | |
| | complete cds. /FEA = mRNA | |
| | /PROD = hemoglobin, alpha 2 | |
| | /DB_XREF = gi: 13543547 /FL = gb: BC005931.1 | |
| dipeptidylpeptidase | gb: M80536.1 /DEF = H. sapiens dipeptidylpeptidase | 203716_s_at |
| IV (CD26, | IV (DPP4) mRNA, complete cds. | |
| adenosine | /FEA = mRNA /GEN = DPP4 /PROD = dipeptidylpeptidase | |
| deaminase | IV /DB_XREF = gi: 181569 | |
| complexing | /UG = Hs.44926 dipeptidylpeptidase IV (CD26, | |
| protein 2) | adenosine deaminase complexing protein 2) | |
| | /FL = gb: M80536.1 gb: NM_001935.1 | |
| spondin 1, (f- | Consensus includes gb: AI885290 /FEA = EST | 213994_s_at |
| spondin) | /DB_XREF = gi: 5590454 | |
| extracellular | /DB_XREF = est: wl92a04.x1 | |
| matrix protein | /CLONE = IMAGE: 2432334 /UG = Hs.5378 | |
| | spondin 1, (f-spondin) extracellular matrix | |
| | protein | |
| 3-hydroxy-3- | gb: NM_005518.1 /DEF = Homo sapiens 3- | 204607_at |
| methylglutaryl- | hydroxy-3-methylglutaryl-Coenzyme A synthase | |
| Coenzyme A | 2 (mitochondrial) (HMGCS2), mRNA. | |
| synthase 2 | /FEA = mRNA /GEN = HMGCS2 /PROD = 3- | |
| (mitochondrial) | hydroxy-3-methylglutaryl-Coenzyme A synthase | |
| | 2(mitochondrial) /DB_XREF = gi: 5031750 | |
| | /UG = Hs.59889 3-hydroxy-3-methylglutaryl- | |
| | Coenzyme A synthase 2 (mitochondrial) | |
| | /FL = gb: NM_005518.1 | |
| mucin 2, | gb: NM_002457.1 /DEF = Homo sapiens mucin 2, | 204673_at |
| intestinal/trachea 1 | intestinaltracheal (MUC2), mRNA. /FEA = mRNA | |
| | /GEN = MUC2 /PROD = mucin 2, intestinaltracheal | |
| | /DB_XREF = gi: 4505284 /UG = Hs.315 mucin 2, | |
| | intestinaltracheal /FL = gb: NM_002457.1 | |
| | gb: L21998.1 | |
| cystic fibrosis | gb: NM_000492.2 /DEF = Homo sapiens cystic | 205043_at |
| transmembrane | fibrosis transmembrane conductance regulator, | |
| conductance | ATP-binding cassette (sub-family C, member 7) | |
| regulator, ATP- | (CFTR), mRNA. /FEA = mRNA /GEN = CFTR | |
| binding cassette | /PROD = cystic fibrosis transmembrane | |
| (sub-family C, | conductanceregulator, ATP-binding cassette (sub- | |
| member 7) | family C, member 7) /DB_XREF = gi: 6995995 | |
| | /UG = Hs.663 cystic fibrosis transmembrane | |
| | conductance regulator, ATP-binding cassette | |
| | (sub-family C, member 7) /FL = gb: NM_000492.2 | |
| CUG triplet | Consensus includes gb: N36839 /FEA = EST | 202156_s_at |
| repeat, RNA- | /DB_XREF = gi: 1157981 | |
| binding protein 2 | /DB_XREF = est: yy35f07.s1 | |
| | /CLONE = IMAGE: 273253 /UG = Hs.211610 CUG | |
| | triplet repeat, RNA-binding protein 2 | |
| | /FL = gb: U69546.1 gb: AF036956.1 | |
| | gb: AF090694.1 gb: NM_006561.1 | |
| nuclear receptor | gb: NM_000901.1 /DEF = Homo sapiens nuclear | 205259_at |
| subfamily 3, | receptor subfamily 3, group C, member 2 | |
| group C, member 2 | (NR3C2), mRNA. /FEA = mRNA /GEN = NR3C2 | |
| | /PROD = nuclear receptor subfamily 3, group C, | |
| | member 2 /DB_XREF = gi: 4505198 /UG = Hs.1790 | |
| | nuclear receptor subfamily 3, group C, member 2 | |
| | /FL = gb: M16801.1 gb: NM_000901.1 | |
| cystic fibrosis | Consensus includes gb: W60595 /FEA = EST | 215702_s_at |
| transmembrane | /DB_XREF = gi: 1367354 | |
| conductance | /DB_XREF = est: zc91b04.s1 | |
| regulator, ATP- | /CLONE = IMAGE: 338479 /UG = Hs.663 cystic | |
| binding cassette | fibrosis transmembrane conductance regulator, | |
| (sub-family C, | ATP-binding cassette (sub-family C, member 7) | |
| member 7) | | |
| cytochrome | gb: NM_000775.1 /DEF = Homo sapiens | 205073_at |
| P450, subfamily | cytochrome P450, subfamily IIJ (arachidonic acid | |
| IIJ (arachidonic | epoxygenase) polypeptide 2 (CYP2J2), mRNA. | |
| acid | /FEA = mRNA /GEN = CYP2J2 | |
| epoxygenase) | /PROD = cytochrome P450, subfamily IIJ | |
| polypeptide 2 | (arachidonic acidepoxygenase) polypeptide 2 | |
| | /DB_XREF = gi: 4503226 /UG = Hs.152096 | |
| | cytochrome P450, subfamily IIJ (arachidonic acid | |
| | epoxygenase) polypeptide 2 /FL = gb: U37143.1 | |
| | gb: NM_000775.1 | |
| cystatin S | gb: NM_001899.1 /DEF = Homo sapiens cystatin S | 206994_at |
| | (CST4), mRNA. /FEA = mRNA /GEN = CST4 | |
| | /PROD = cystatin S /DB_XREF = gi: 4503108 | |
| | /UG = Hs.56319 cystatin S /FL = gb: NM_001899.1 | |
| spondin 1, (f- | Consensus includes gb: AI885290 /FEA = EST | 213993_at |
| spondin) | /DB_XREF = gi: 5590454 | |
| extracellular | /DB_XREF = est: wl92a04.x1 | |
| matrix protein | /CLONE = IMAGE: 2432334 /UG = Hs.5378 | |
| | spondin 1, (f-spondin) extracellular matrix | |
| | protein | |
| fibroblast growth | gb: NM_022969.1 /DEF = Homo sapiens fibroblast | 203638_s_at |
| factor receptor 2 | growth factor receptor 2 (bacteria-expressed | |
| (bacteria- | kinase, keratinocyte growth factor receptor, | |
| expressed kinase, | craniofacial dysostosis 1, Crouzon syndrome, | |
| keratinocyte | Pfeiffer syndrome, Jackson-Weiss syndrome) | |
| growth factor | (FGFR2), transcript variant 2, mRNA. | |
| receptor, | /FEA = mRNA /GEN = FGFR2 /PROD = fibroblast | |
| craniofacial | growth factor receptor 2, isoform 2precursor | |
| dysostosis 1, | /DB_XREF = gi: 13186252 /UG = Hs.278581 | |
| Crouzon | fibroblast growth factor receptor 2 (bacteria- | |
| syndrome, | expressed kinase, keratinocyte growth factor | |
| Pfeiffer | receptor, craniofacial dysostosis 1, Crouzon | |
| syndrome, | syndrome, Pfeiffer syndrome, Jackson-Weiss | |
| Jackson-Weiss | syndrome) /FL = gb: NM_022969.1 gb: M97193.1 | |
| syndrome) | gb: M80634.1 | |
| mucin 3B | Consensus includes gb: AB038783.1 /DEF = Homo | 214898_x_at |
| | sapiens MUC3B mRNA for intestinal mucin, | |
| | partial cds. /FEA = mRNA /GEN = MUC3B | |
| | /PROD = intestinal mucin /DB_XREF = gi: 9929917 | |
| | /UG = Hs.129782 mucin 3A, intestinal | |
| AA | Consensus includes gb: AV728958 /FEA = EST | 212703_at |
| | /DB_XREF = gi: 10838379 | |
| | /DB_XREF = est: AV728958 | |
| | /CLONE = HTCBYF04 /UG = Hs.150443 | |
| | KIAA0320 protein | |
| CUG triplet | gb: NM_006561.1 /DEF = Homo sapiens CUG | 202158_s_at |
| repeat, RNA- | triplet repeat, RNA-binding protein 2 (CUGBP2), | |
| binding protein 2 | mRNA. /FEA = mRNA /GEN = CUGBP2 | |
| | /PROD = CUG triplet repeat, RNA-binding protein | |
| | 2 /DB_XREF = gi: 5729815 /UG = Hs.211610 CUG | |
| | triplet repeat, RNA-binding protein 2 | |
| | /FL = gb: U69546.1 gb: AF036956.1 | |
| | gb: AF090694.1 gb: NM_006561.1 | |
| spondin 1, (f- | gb: AB051390.1 /DEF = Homo sapiens mRNA for | 209437_s_at |
| spondin) | VSGPF-spondin, complete cds. /FEA = mRNA | |
| extracellular | /PROD = VSGPF-spondin | |
| matrix protein | /DB_XREF = gi: 11320819 /UG = Hs.5378 spondin | |
| | 1, (f-spondin) extracellular matrix protein | |
| | /FL = gb: AB051390.1 | |
| mucin 3B | Consensus includes gb: AF113616 /DEF = Homo | 214676_x_at |
| | sapiens intestinal mucin 3 (MUC3) gene, partial | |
| | cds /FEA: = mRNA /DB_XREF = gi: 6466800 | |
| | /UG = Hs.129782 mucin 3A, intestinal | |
| EphA1 | gb: NM_005232.1 /DEF = Homo sapiens EphA1 | 205977_s_at |
| | (EPHA1), mRNA. /FEA = mRNA /GEN = EPHA1 | |
| | /PROD = EphA1 /DB_XREF = gi: 4885208 | |
| | /UG = Hs.89839 EphA1 /FL = gb: M18391.1 | |
| | gb: NM_005232.1 | |
| matrilin 3 | gb: NM_002381.2 /DEF = Homo sapiens matrilin 3 | 206091_at |
| | (MATN3) precursor, mRNA. /FEA = mRNA | |
| | /GEN = MATN3 /PROD = matrilin 3 precursor | |
| | /DB_XREF = gi: 13518040 /UG = Hs.278461 | |
| | matrilin 3 /FL = gb: NM_002381.2 | |
| bone | gb: NM_001200.1 /DEF = Homo sapiens bone | 205290_s_at |
| morphogenetic | morphogenetic protein 2 (BMP2), mRNA. | |
| protein 2 | /FEA = mRNA /GEN = BMP2 /PROD = bone | |
| | morphogenetic protein 2 precursor | |
| | /DB_XREF = gi: 4557368 /UG = Hs.73853 bone | |
| | morphogenetic protein 2 /FL = gb: NM_001200.1 | |
| interferon | Consensus includes gb: AI073984 /FEA = EST | 204057_at |
| consensus | /DB_XREF = gi: 3400628 | |
| sequence binding | /DB_XREF = est: oy66c05.x1 | |
| protein 1 | /CLONE = IMAGE: 1670792 /UG = Hs.14453 | |
| | interferon consensus sequence binding protein 1 | |
| | /FL = gb: M91196.1 gb: NM_002163.1 | |
| retinoic acid | Consensus includes gb: AI669229 /FEA = EST | 221872_at |
| receptor | /DB_XREF = gi: 4834003 | |
| responder | /DB_XREF = est: wc13e06.x1 | |
| (tazarotene | /CLONE = IMAGE: 2315074 /UG = Hs.82547 | |
| induced) 1 | retinoic acid receptor responder (tazarotene | |
| | induced) 1 | |
| cystic fibrosis | Consensus includes gb: W60595 /FEA = EST | 215703_at |
| transmembrane | /DB_XREF = gi: 1367354 | |
| conductance | /DB_XREF = est: zc91b04.s1 | |
| regulator, ATP- | /CLONE = IMAGE: 338479 /UG = Hs.663 cystic | |
| binding cassette | fibrosis transmembrane conductance regulator, | |
| (sub-family C, | ATP-binding cassette (sub-family C, member 7) | |
| member 7) | | |
| fibroblast growth | gb: M87771.1 /DEF = Human secreted fibroblast | 208228_s_at |
| factor receptor 2 | growth factor receptor (K-sam-III) mRNA, | |
| (bacteria- | complete cds. /FEA = mRNA /GEN = K-sam-III | |
| expressed kinase, | /PROD = fibroblast growth factor receptor | |
| keratinocyte | /DB_XREF = gi: 186781 /UG = Hs.278581 | |
| growth factor | fibroblast growth factor receptor 2 (bacteria- | |
| receptor, | expressed kinase, keratinocyte growth factor | |
| craniofacial | receptor, craniofacial dysostosis 1, Crouzon | |
| dysostosis 1, | syndrome, Pfeiffer syndrome, Jackson-Weiss | |
| Crouzon | syndrome) /FL = gb: NM_022970.1 gb: M87771.1 | |
| syndrome, | | |
| Pfeiffer | | |
| syndrome, | | |
| Jackson-Weiss | | |
| syndrome) | | |
| myosin, heavy | gb: NM_003802.1 /DEF = Homo sapiens myosin, | 208208_at |
| polypeptide 13, | heavy polypeptide 13, skeletal muscle (MYH13), | |
| skeletal muscle | mRNA. /FEA = mRNA /GEN = MYH13 | |
| | /PROD = myosin, heavy polypeptide 13, skeletal | |
| | muscle /DB_XREF = gi: 11321578 | |
| | /UG = Hs.278488 myosin, heavy polypeptide 13, | |
| | skeletal muscle /FL = gb: NM_003802.1 | |
| | gb: AF111782.2 | |
| ESTs, Weakly | Consensus includes gb: AW675655 /FEA = EST | 222354_at |
| similar to I38022 | /DB_XREF = gi: 7540890 | |
| hypothetical | /DB_XREF = est: ba52e01.x1 | |
| protein | /CLONE = IMAGE: 2900184 /UG = Hs.314158 | |
| [H. sapiens] | ESTs | |
| hypothetical | gb: NM_017699.1 /DEF = Homo sapiens | 219734_at |
| protein | hypothetical protein FLJ20174 (FLJ20174), | |
| FLJ20174 | mRNA. /FEA = mRNA /GEN = FLJ20174 | |
| | /PROD = hypothetical protein FLJ20174 | |
| | /DB_XREF = gi: 8923170 /UG = Hs.114556 | |
| | hypothetical protein FLJ20174 | |
| | /FL = gb: NM_017699.1 | |
| PTPRF | Consensus includes gb: AI692180 /FEA = EST | 212841_s_at |
| interacting | /DB_XREF = gi: 4969520 | |
| protein, binding | /DB_XREF = est: wd37f06.x1 | |
| protein 2 (liprin | /CLONE = IMAGE: 2330339 /UG = Hs.12953 | |
| beta 2) | PTPRF interacting protein, binding protein 2 | |
| | (liprin beta 2) | |
| ribonuclease, | gb: NM_002933.1 /DEF = Homo sapiens | 201785_at |
| RNase A family, | ribonuclease, RNase A family, 1 (pancreatic) | |
| 1 (pancreatic) | (RNASE1), mRNA. /FEA = mRNA | |
| | /GEN = RNASE1 /PROD = ribonuclease, RNase A | |
| | family, 1 (pancreatic) /DB_XREF = gi: 4506546 | |
| | /UG = Hs.78224 ribonuclease, RNase A family, 1 | |
| | (pancreatic) /FL = gb: BC005324.1 | |
| | gb: NM_002933.1 gb: D26129.1 | |
| hairless (mouse) | gb: NM_018411.1 /DEF = Homo sapiens hairless | 220163_s_at |
| homolog | protein (putative single zinc finger transcription | |
| | factor protein, responsible for autosomal | |
| | recessive universal congenital alopecia, HR gene) | |
| | (HSA277165), mRNA. /FEA = mRNA | |
| | /GEN = HSA277165 /PROD = hairless protein | |
| | /DB_XREF = gi: 11036651 /UG = Hs.272367 | |
| | hairless protein (putative single zinc finger | |
| | transcription factor protein, responsible for | |
| | autosomal recessive universal congenital | |
| | alopecia, HR gene) /FL = gb: NM_018411.1 | |
| nuclear receptor | Consensus includes gb: AF228413.1 /DEF = Homo | 210174_at |
| subfamily 5, | sapiens hepatocyte transcription factor mRNA, | |
| group A, | 3UTR. /FEA = mRNA /DB_XREF = gi: 7677372 | |
| member 2 | /UG = Hs.183123 nuclear receptor subfamily 5, | |
| | group A, member 2 /FL = gb: U93553.1 | |
| | gb: AB019246.1 gb: AF124247.1 | |
| superoxide | gb: NM_003102.1 /DEF = Homo sapiens | 205236_x_at |
| dismutase 3, | superoxide dismutase 3, extracellular (SOD3), | |
| extracellular | mRNA. /FEA = mRNA /GEN = SOD3 | |
| | /PROD = superoxide dismutase 3, extracellular | |
| | /DB_XREF = gi: 4507150 /UG = Hs.2420 | |
| | superoxide dismutase 3, extracellular | |
| | /FL = gb: J02947.1 gb: NM_003102.1 | |
| zinc finger | gb: NM_003438.1 /DEF = Homo sapiens zinc | 207394_at |
| protein 137 | finger protein 137 (clone pHZ-30) (ZNF137), | |
| (clone pHZ-30) | mRNA. /FEA = mRNA /GEN = ZNF137 | |
| | /PROD = zinc finger protein 137 (clone pHZ-30) | |
| | /DB_XREF = gi: 4507988 /UG = Hs.151689 zinc | |
| | finger protein 137 (clone pHZ-30) | |
| | /FL = gb: NM_003438.1 gb: U09414.1 | |
| Homo sapiens | Consensus includes gb: AL049983.1 /DEF = Homo | 217288_at |
| mRNA; cDNA | sapiens mRNA; cDNA DKFZp564D042 (from | |
| DKFZp564D042 | clone DKFZp564D042). /FEA = mRNA | |
| (from clone | /DB_XREF = gi: 4884234 /UG = Hs.240136 Homo | |
| DKFZp564D042) | sapiens mRNA; cDNA DKFZp564D042 (from | |
| | clone DKFZp564D042) | |
| Hermansky- | Consensus includes gb: AL022313 /DEF = Human | 217354_s_at |
| Pudlak syndrome | DNA sequence from clone RP5-1119A7 on | |
| | chromosome 22q12.2-12.3 Contains the TXN2 | |
| | gene for mitochondrial thioredoxin, a novel gene, | |
| | the EIF3S7 gene for eukaryotic translation | |
| | initiation factor 3 subunit 7 (zeta, 6667 kD) (EIF3- | |
| | P66), the gene f . . . /FEA = CDS_3 | |
| | /DB_XREF = gi: 4200326 /UG = Hs.272270 Human | |
| | DNA sequence from clone RP5-1119A7 on | |
| | chromosome 22q12.2-12.3 Contains the TXN2 | |
| | gene for mitochondrial thioredoxin, a novel gene, | |
| | the EIF3S7 gene for eukaryotic translation | |
| | initiation factor 3 subunit 7 (zeta, 6667 kD) (EIF3- | |
| | P66), the gene for a nov | |
| peroxisomal | gb: NM_018441.1 /DEF = Homo sapiens | 221142_s_at |
| trans 2-enoyl | peroxisomal trans 2-enoyl CoA reductase; | |
| CoA reductase; | putative short chain alcohol dehydrogenase | |
| putative short | (HSA250303), mRNA. /FEA = mRNA | |
| chain alcohol | /GEN = HSA250303 /PROD = peroxisomal trans 2- | |
| dehydrogenase | enoyl CoA reductase; putative short chain alcohol | |
| | dehydrogenase /DB_XREF = gi: 8923751 | |
| | /UG = Hs.281680 peroxisomal trans 2-enoyl CoA | |
| | reductase; putative short chain alcohol | |
| | dehydrogenase /FL = gb: NM_018441.1 | |
| BTG family, | gb: NM_006763.1 /DEF = Homo sapiens BTG | 201236_s_at |
| member 2 | family, member 2 (BTG2), mRNA. /FEA = mRNA | |
| | /GEN = BTG2 /PROD = BTG family, member 2 | |
| | /DB_XREF = gi: 5802987 /UG = Hs.75462 BTG | |
| | family, member 2 /FL = gb: U72649.1 | |
| | gb: NM_006763.1 | |
| phosducin | gb: M33478.1 /DEF = Human 33-kDa | 211496_s_at |
| | phototransducing protein mRNA, complete cds. | |
| | /FEA = mRNA /DB_XREF = gi: 177186 | |
| | /UG = Hs.550 phosducin /FL = gb: NM_022577.1 | |
| | gb: M33478.1 gb: AF076465.1 | |
| Rho GTPase | gb: NM_015366.1 /DEF = Homo sapiens Rho | 205980_s_at |
| activating protein 8 | GTPase activating protein 8 (ARHGAP8), | |
| | mRNA. /FEA = mRNA /GEN = ARHGAP8 | |
| | /PROD = Rho GTPase activating protein 8 | |
| | /DB_XREF = gi: 7656903 /UG = Hs.102336 Rho | |
| | GTPase activating protein 8 | |
| | /FL = gb: NM_015366.1 | |
| Homo sapiens | Consensus includes gb: AW593996 /FEA = EST | 213256_at |
| clone 24707 | /DB_XREF = gi: 7281254 | |
| mRNA sequence | /DB_XREF = est: hg41g06.x1 | |
| | /CLONE = IMAGE: 2948218 /UG = Hs.124969 | |
| | Homo sapiens clone 24707 mRNA sequence | |
| caspase 10, | gb: NM_001230.1 /DEF = Homo sapiens caspase | 205467_at |
| apoptosis-related | 10, apoptosis-related cysteine protease | |
| cysteine protease | (CASP10), mRNA. /FEA = mRNA | |
| | /GEN = CASP10 /PROD = caspase 10, apoptosis- | |
| | related cysteine protease /DB_XREF = gi: 4502568 | |
| | /UG = Hs.5353 caspase 10, apoptosis-related | |
| | cysteine protease /FL = gb: U60519.1 | |
| | gb: NM_001230.1 | |
| KIAA0690 | Consensus includes gb: AK000238.1 /DEF = Homo | 216360_x_at |
| protein | sapiens cDNA FLJ20231 fis, clone COLF5511, | |
| | highly similar to AB014590 Homo sapiens | |
| | mRNA for KIAA0690 protein. /FEA = mRNA | |
| | /DB_XREF = gi: 7020188 /UG = Hs.60103 | |
| | KIAA0690 protein | |
| Homo sapiens, | Consensus includes gb: AW001287 /FEA = EST | 227676_at |
| Similar to | /DB_XREF = gi: 5848203 | |
| RIKEN cDNA | /DB_XREF = est: wu27e06.x1 | |
| 1810037C20 | /CLONE = IMAGE: 2521282 /UG = Hs.61265 | |
| gene, clone | ESTs, Weakly similar to G786_HUMAN | |
| MGC: 21481 | PROTEIN GS3786 H. sapiens | |
| IMAGE: 385206 | | |
| 2, mRNA, | | |
| complete cds | | |
| ESTs | Consensus includes gb: AA581439 /FEA = EST | 244650_at |
| | /DB_XREF = gi: 2359211 | |
| | /DB_XREF = est: nh13c10.s1 | |
| | /CLONE = IMAGE: 952242 /UG = Hs.152328 | |
| | ESTs | |
| ESTs | Consensus includes gb: AI739241 /FEA = EST | 238984_at |
| | /DB_XREF = gi: 5101222 | |
| | /DB_XREF = est: wi14h02.x1 | |
| | /CLONE = IMAGE: 2390259 /UG = Hs.171480 | |
| | ESTs | |
| hypothetical | Consensus includes gb: AB046810.1 /DEF = Homo | 232083_at |
| protein | sapiens mRNA for KIAA1590 protein, partial | |
| FLJ23045 | cds. /FEA = mRNA /GEN = KIAA1590 | |
| | /PROD = KIAA1590 protein | |
| | /DB_XREF = gi: 10047254 /UG = Hs.101774 | |
| | hypothetical protein FLJ23045 | |
| regenerating | gb: AY007243.1 /DEF = Homo sapiens | 223447_at |
| gene type IV | regenerating gene type IV mRNA, complete cds. | |
| | /FEA = mRNA /PROD = regenerating gene type IV | |
| | /DB_XREF = gi: 12621025 /UG = Hs.105484 Homo | |
| | sapiens regenerating gene type IV mRNA, | |
| | complete cds /FL = gb: AY007243.1 | |
| ESTs | Consensus includes gb: AI139990 /FEA = EST | 231022_at |
| | /DB_XREF = gi: 3647447 | |
| | /DB_XREF = est: qa47d03.x1 | |
| | /CLONE = IMAGE: 1689893 /UG = Hs.134586 | |
| | ESTs | |
| ESTs | Consensus includes gb: AI733801 /FEA = EST | 237923_at |
| | /DB_XREF = gi: 5054914 | |
| | /DB_XREF = est: qk39c04.x5 | |
| | /CLONE = IMAGE: 1871334 /UG = Hs.146186 | |
| | ESTs | |
| hypothetical | Consensus includes gb: AK002203.1 /DEF = Homo | 226992_at |
| protein | sapiens cDNA FLJ11341 fis, clone | |
| MGC20702 | PLACE1010786. /FEA = mRNA | |
| | /DB_XREF = gi: 7023932 /UG = Hs.10260 Homo | |
| | sapiens cDNA FLJ11341 fis, clone | |
| | PLACE1010786 | |
| ESTs, Weakly | Consensus includes gb: AI457984 /FEA = EST | 243729_at |
| similar to | /DB_XREF = gi: 4312002 | |
| ALU1_HUMAN | /DB_XREF = est: tj66a04.x1 | |
| ALU | /CLONE = IMAGE: 2146446 /UG = Hs.165900 | |
| SUBFAMILY J | ESTs, Weakly similar to ALUC_HUMAN !!!! | |
| SEQUENCE | ALU CLASS C WARNING ENTRY !!! | |
| CONTAMINATION | H. sapiens | |
| WARNING | | |
| ENTRY | | |
| [H. sapiens] | | |
| Homo sapiens | Consensus includes gb: T86159 /FEA = EST | 227724_at |
| cDNA: | /DB_XREF = gi: 714511 | |
| FLJ22063 fis, | /DB_XREF = est: yd84h07.s1 | |
| clone HEP10326 | /CLONE = IMAGE: 114973 /UG = Hs.10450 | |
| | Homo sapiens cDNA: FLJ22063 fis, clone | |
| | HEP10326 | |
| ESTs | Consensus includes gb: AI806131 /FEA = EST | 231148_at |
| | /DB_XREF = gi: 5392697 | |
| | /DB_XREF = est: wf06c06.x1 | |
| | /CLONE = IMAGE: 2349802 /UG = Hs.99376 | |
| | ESTs | |
| anterior gradient | Consensus includes gb: AI922323 /FEA = EST | 228969_at |
| 2 (Xenepus | /DB_XREF = gi: 5658287 | |
| laevis) homolog | /DB_XREF = est: wn90h03.x1 | |
| | /CLONE = IMAGE: 2453141 /UG = Hs.293380 | |
| | ESTs | |
| ESTs | Consensus includes gb: AI493909 /FEA = EST | 235562_at |
| | /DB_XREF = gi: 4394912 | |
| | /DB_XREF = est: qz94e02.x1 | |
| | /CLONE = IMAGE: 2042234 /UG = Hs.6131 ESTs | |
| hypothetical | Consensus includes gb: AI339568 /FEA = EST | 222727_s_at |
| protein | /DB_XREF = gi: 4076495 | |
| FLJ22233 | /DB_XREF = est: qk67e10.x1 | |
| | /CLONE = IMAGE: 1874058 /UG = Hs.286194 | |
| | hypothetical protein FLJ22233 | |
| | /FL = gb: NM_024959.1 | |
| GalNAc alpha-2,6- | Consensus includes gb: Y11339.2 /DEF = Homo | 227725_at |
| sialyltransferase | sapiens mRNA for GalNAc alpha-2,6- | |
| I, long form | sialyltransferase I, long form. /FEA = mRNA | |
| | /PROD = GalNAc alpha-2,6-sialyltransferase I | |
| | /DB_XREF = gi: 7576275 /UG = Hs.105352 | |
| | GalNAc alpha-2,6-sialyltransferase I, long form | |
| ESTs | Consensus includes gb: AI917390 /FEA = EST | 240964_at |
| | /DB_XREF = gi: 5637245 | |
| | /DB_XREF = est: ts79a05.x1 | |
| | /CLONE = IMAGE: 2237456 /UG = Hs.99415 | |
| | ESTs | |
| Homo sapiens | Consensus includes gb: AK026404.1 /DEF = Homo | 232321_at |
| cDNA: | sapiens cDNA: FLJ22751 fis, clone KAIA0483, | |
| FLJ22751 fis, | highly similar to AF016692 Homo sapiens small | |
| clone | intestinal mucin (MUC3) mRNA. /FEA = mRNA | |
| KAIA0483, | /DB_XREF = gi: 10439257 /UG = Hs.271819 Homo | |
| highly similar to | sapiens cDNA: FLJ22751 fis, clone KAIA0483, | |
| AF016692 Homo | highly similar to AF016692 Homo sapiens small | |
| sapiens small | intestinal mucin (MUC3) mRNA | |
| intestinal mucin | | |
| (MUC3) mRNA | | |
| Homo sapiens | Consensus includes gb: AK026984.1 /DEF = Homo | 229021_at |
| cDNA: | sapiens cDNA: FLJ23331 fis, clone HEP12664. | |
| FLJ23331 fis, | /FEA = mRNA /DB_XREF = gi: 10439980 | |
| clone HEP12664 | /UG = Hs.50742 Homo sapiens cDNA: FLJ23331 | |
| | fis, clone HEP12664 | |
| ESTs | Consensus includes gb: AA827649 /FEA = EST | 235515_at |
| | /DB_XREF = gi: 2900090 | |
| | /DB_XREF = est: od01a12.s1 | |
| | /CLONE = IMAGE: 1357918 /UG = Hs.105317 | |
| | ESTs | |
| prostate cancer | Consensus includes gb: AA633076 /FEA = EST | 226167_at |
| associated | /DB_XREF = gi: 2556490 | |
| protein 7 | /DB_XREF = est: nq38a06.s1 | |
| | /CLONE = IMAGE: 1146130 /UG = Hs.27495 | |
| | prostate cancer associated protein 7 | |
| ESTs | Consensus includes gb: N37023 /FEA = EST | 225407_at |
| | /DB_XREF = gi: 1158165 | |
| | /DB_XREF = est: yy40d03.s1 | |
| | /CLONE = IMAGE: 273701 /UG = Hs.235883 | |
| | ESTs | |
| ESTs, Weakly | Consensus includes gb: AI864053 /FEA = EST | 235678_at |
| similar to I38588 | /DB_XREF = gi: 5528160 | |
| reverse | /DB_XREF = est: wj55h10.x1 | |
| transcriptase | /CLONE = IMAGE: 2406787 /UG = Hs.39972 | |
| homolog | ESTs, Weakly similar to I38588 reverse | |
| [H. sapiens] | transcriptase homolog H. sapiens | |
| ESTs, Weakly | Consensus includes gb: AA557324 /FEA = EST | 227702_at |
| similar to | /DB_XREF = gi: 2327801 | |
| JX0331 laurate | /DB_XREF = est: nl81a02.s1 | |
| omega- | /CLONE = IMAGE: 1057034 /UG = Hs.26040 | |
| hydroxylase | ESTs, Weakly similar to fatty acid omega- | |
| [H. sapiens] | hydroxylase H. sapiens | |
| ESTs | Consensus includes gb: BF594323 /FEA = EST | 238103_at |
| | /DB_XREF = gi: 11686647 | |
| | /DB_XREF = est: 7h79g07.x1 | |
| | /CLONE = IMAGE: 3322236 /UG = Hs.158989 | |
| | ESTs | |
| ESTs, Weakly | Consensus includes gb: AI827789 /FEA = EST | 228241_at |
| similar to | /DB_XREF = gi: 5448449 | |
| JE0350 Anterior | /DB_XREF = est: wf33a07.x1 | |
| gradient-2 | /CLONE = IMAGE: 2357364 /UG = Hs.100686 | |
| [H. sapiens] | ESTs, Weakly similar to JE0350 Anterior | |
| | gradient-2 H. sapiens | |
| ESTs | Consensus includes gb: AI968097 /FEA = EST | 237835_at |
| | /DB_XREF = gi: 5764915 | |
| | /DB_XREF = est: wu13a12.x1 | |
| | /CLONE = IMAGE: 2516830 /UG = Hs.131360 | |
| | ESTs | |
| ESTs | Consensus includes gb: H05025 /FEA = EST | 241874_at |
| | /DB_XREF = gi: 868577 | |
| | /DB_XREF = est: y174g12.s1 | |
| | /CLONE = IMAGE: 43864 /UG = Hs.323767 ESTs | |
| Homo sapiens, | Consensus includes gb: AA524690 /FEA = EST | 226168_at |
| Similar to | /DB_XREF = gi: 2265618 | |
| RIKEN cDNA | /DB_XREF = est: ng38e07.s1 | |
| 1110060O18 | /CLONE = IMAGE: 937092 /UG = Hs.294143 | |
| gene, clone | ESTs, Weakly similar to predicted using | |
| MGC: 17236 | Genefinder C. elegans | |
| IMAGE: 3864137, | | |
| mRNA, | | |
| complete cds | | |
| ESTs | Consensus includes gb: AI300126 /FEA = EST | 240830_at |
| | /DB_XREF = gi: 3959472 | |
| | /DB_XREF = est: qn54f02.x1 | |
| | /CLONE = IMAGE: 1902075 /UG = Hs.257858 | |
| | ESTs | |
| Homo sapiens | Consensus includes gb: AA129774 /FEA = EST | 227019_at |
| cDNA FLJ13137 | /DB_XREF = gi: 1690185 | |
| fis, clone | /DB_XREF = est: z116h09.s1 | |
| NT2RP3003150 | /CLONE = IMAGE: 502145 /UG = Hs.288905 | |
| | Homo sapiens cDNA FLJ13137 fis, clone | |
| | NT2RP3003150 | |
| ESTs | Consensus includes gb: AW024656 /FEA = EST | 242358_at |
| | /DB_XREF = gi: 5878186 | |
| | /DB_XREF = est: wu78h05.x1 | |
| | /CLONE = IMAGE: 2526201 /UG = Hs.233382 | |
| | ESTs, Moderately similar to AF119917 62 | |
| | PRO2822 H. sapiens | |

[0092] The biomarker probe set list B (Table 3) contains 95 probe sets (U133A: 47; U133B 48). The biomarker probe set list B contains polynucleotides identified to be biomarkers of EGFR antagonist sensitivity employing strategy B. In strategy B, polynucleotides were required to satisfy a stringent criteria for correlation to IC₅₀ values and a less stringent condition for EGFR status coregulation. Namely, the polynucleotides had to have a Pearsons correlation of −0.5 or less with respect to IC₅₀ and be called absent by the Affymetrix software in 5 out of the 6 cell lines with lowest expression of EGFR.

TABLE 3
Biomarker Probe Set List B

| | | Affymetrix |
|---|---|---|
| Unigene Title | Affymetrix Description | probe set |
| dopa | Consensus includes gb: AW772056 /FEA = EST | 214347_s_at |
| decarboxylase | /DB_XREF = gi: 7704118 | |
| (aromatic L- | /DB_XREF = est: hn64g06.x1 | |
| amino acid | /CLONE = IMAGE: 3032698 /UG = Hs.150403 | |
| decarboxylase) | dopa decarboxylase (aromatic L-amino acid | |
| | decarboxylase) | |
| cystic fibrosis | gb: NM_000492.2 /DEF = Homo sapiens cystic | 205043_at |
| transmembrane | fibrosis transmembrane conductance regulator, | |
| conductance | ATP-binding cassette (sub-family C, member 7) | |
| regulator, ATP- | (CFTR), mRNA. /FEA = mRNA /GEN = CFTR | |
| binding cassette | /PROD = cystic fibrosis transmembrane | |
| (sub-family C, | conductanceregulator, ATP-binding cassette | |
| member 7) | (sub-family C, member 7) | |
| | /DB_XREF = gi: 6995995 /UG = Hs.663 cystic | |
| | fibrosis transmembrane conductance regulator, | |
| | ATP-binding cassette (sub-family C, member 7) | |
| | /FL = gb: NM_000492.2 | |
| carcinoembryonic | gb: BC005008.1 /DEF = Homo sapiens, | 203757_s_at |
| antigen-related | carcinoembryonic antigen-related cell adhesion | |
| cell adhesion | molecule 6 (non-specific cross reacting antigen), | |
| molecule 6 (non- | clone MGC: 10467, mRNA, complete cds. | |
| specific cross | /FEA = mRNA /PROD = carcinoembryonic | |
| reacting antigen) | antigen-related cell adhesionmolecule 6 (non- | |
| | specific cross reacting antigen) | |
| | /DB_XREF = gi: 13477106 /UG = Hs.73848 | |
| | carcinoembryonic antigen-related cell adhesion | |
| | molecule 6 (non-specific cross reacting antigen) | |
| | /FL = gb: BC005008.1 gb: M18216.1 gb: M29541.1 | |
| | gb: NM_002483.1 | |
| hypothetical | gb: NM_017655.1 /DEF = Homo sapiens | 219970_at |
| protein | hypothetical protein FLJ20075 (FLJ20075), | |
| FLJ20075 | mRNA. /FEA = mRNA /GEN = FLJ20075 | |
| | /PROD = hypothetical protein FLJ20075 | |
| | /DB_XREF = gi: 8923083 /UG = Hs.205058 | |
| | hypothetical protein FLJ20075 | |
| | /FL = gb: NM_017655.1 | |
| ATPase, Class | Consensus includes gb: AW006935 /FEA = EST | 214070_s_at |
| V, type 10B | /DB_XREF = gi: 5855713 | |
| | /DB_XREF = est: wt08b11.x1 | |
| | /CLONE = IMAGE: 2506845 /UG = Hs.109358 | |
| | ATPase, Class V, type 10B | |
| cystic fibrosis | Consensus includes gb: W60595 /FEA = EST | 215702_s_at |
| transmembrane | /DB_XREF = gi: 1367354 | |
| conductance | /DB_XREF = est: zc91b04.s1 | |
| regulator, ATP- | /CLONE = IMAGE: 338479 /UG = Hs.663 cystic | |
| binding cassette | fibrosis transmembrane conductance regulator, | |
| (sub-family C, | ATP-binding cassette (sub-family C, member 7) | |
| member 7) | | |
| HERV-H LTR- | gb: NM_007072.1 /DEF = Homo sapiens HERV- | 220812_s_at |
| associating 2 | H LTR-associating 2 (HHLA2), mRNA. | |
| | /FEA = mRNA /GEN = HHLA2 /PROD = HERV-H | |
| | LTR-associating 2 /DB_XREF = gi: 5901963 | |
| | /UG = Hs.252351 HERV-H LTR-associating 2 | |
| | /FL = gb: AF126162.1 gb: NM_007072.1 | |
| AA | Consensus includes gb: AV728958 /FEA = EST | 212703_at |
| | /DB_XREF = gi: 10838379 | |
| | /DB_XREF = est: AV728958 | |
| | /CLONE = HTCBYF04 /UG = Hs.150443 | |
| | KIAA0320 protein | |
| hemoglobin, | Consensus includes gb: T50399 /FEA = EST | 214414_x_at |
| alpha 2 | /DB_XREF = gi: 652259 | |
| | /DB_XREF = est: yb30b11.s1 | |
| | /CLONE = IMAGE: 72669 /UG = Hs.251577 | |
| | hemoglobin, alpha 1 | |
| spondin 1, (f- | Consensus includes gb: AI885290 /FEA = EST | 213993_at |
| spondin) | /DB_XREF = gi: 5590454 | |
| extracellular | /DB_XREF = est: w192a04.x1 | |
| matrix protein | /CLONE = IMAGE: 2432334 /UG = Hs.5378 | |
| | spondin 1, (f-spondin) extracellular matrix | |
| | protein | |
| hemoglobin, | gb: BC005931.1 /DEF = Homo sapiens, | 211745_x_at |
| alpha 1 | hemoglobin, alpha 2, clone MGC: 14541, | |
| | mRNA, complete cds. /FEA = mRNA | |
| | /PROD = hemoglobin, alpha 2 | |
| | /DB_XREF = gi: 13543547 /FL = gb: BC005931.1 | |
| serine (or | gb: NM_002639.1 /DEF = Homo sapiens serine | 204855_at |
| cysteine) | (or cysteine) proteinase inhibitor, clade B | |
| proteinase | (ovalbumin), member 5 (SERPINB5), mRNA. | |
| inhibitor, clade B | /FEA = mRNA /GEN = SERPINB5 /PROD = serine | |
| (ovalbumin), | (or cysteine) proteinase inhibitor, cladeB | |
| member 5 | (ovalbumin), member 5 /DB_XREF = gi: 4505788 | |
| | /UG = Hs.55279 serine (or cysteine) proteinase | |
| | inhibitor, clade B (ovalbumin), member 5 | |
| | /FL = gb: NM_002639.1 gb: U04313.1 | |
| 3-hydroxy-3- | gb: NM_005518.1 /DEF = Homo sapiens 3- | 204607_at |
| methylglutaryl- | hydroxy-3-methylglutaryl-Coenyme A synthase | |
| Coenzyme A | 2 (mitochondrial) (HMGCS2), mRNA. | |
| synthase 2 | /FEA = mRNA /GEN = HMGCS2 /PROD = 3- | |
| (mitochondrial) | hydroxy-3-methylglutaryl-Coenyme A synthase | |
| | 2(mitochondrial) /DB_XREF = gi: 5031750 | |
| | /UG = Hs.59889 3-hydroxy-3-methylglutaryl- | |
| | Coenzyme A synthase 2 (mitochondrial) | |
| | /FL = gb: NM_005518.1 | |
| anterior gradient | gb: AF088867.1 /DEF = Homo sapiens putative | 209173_at |
| 2 (Xenepus | secreted protein XAG mRNA, complete cds. | |
| laevis) homolog | /FEA = mRNA /PROD = putative secreted protein | |
| | XAG /DB_XREF = gi: 6652811 /UG = Hs.91011 | |
| | anterior gradient 2 (Xenepus laevis) homolog | |
| | /FL = gb: AF007791.1 gb: AF038451.1 | |
| | gb: NM_006408.1 gb: AF088867.1 | |
| FXYD domain- | gb: BC005238.1 /DEF = Homo sapiens, FXYD | 202489_s_at |
| containing ion | domain-containing ion transport regulator 3, | |
| transport | clone MGC: 12265, mRNA, complete cds. | |
| regulator 3 | /FEA = mRNA /PROD = FXYD domain- | |
| | containing ion transport regulator3 | |
| | /DB_XREF = gi: 13528881 /UG = Hs.301350 | |
| | FXYD domain-containing ion transport regulator | |
| | 3 /FL = gb: NM_005971.2 gb: BC005238.1 | |
| dipeptidylpeptidase | gb: M80536.1 /DEF = H. sapiens dipeptidylpeptidase | 203716_s_at |
| IV (CD26, | IV (DPP4) mRNA, complete cds. | |
| adenosine | /FEA = mRNA /GEN = DPP4 /PROD = dipeptidylpeptidase | |
| deaminase | IV /DB_XREF = gi: 181569 | |
| complexing | /UG = Hs.44926 dipeptidylpeptidase IV (CD26, | |
| protein 2) | adenosine deaminase complexing protein 2) | |
| | /FL = gb: M80536.1 gb: NM_001935.1 | |
| cystic fibrosis | Consensus includes gb: W60595 /FEA = EST | 215703_at |
| transmembrane | /DB_XREF = gi: 1367354 | |
| conductance | /DB_XREF = est: zc91b04.s1 | |
| regulator, ATP- | /CLONE = IMAGE: 338479 /UG = Hs.663 cystic | |
| binding cassette | fibrosis transmembrane conductance regulator, | |
| (sub-family C, | ATP-binding cassette (sub-family C, member 7) | |
| member 7) | | |
| EphA1 | gb: NM_005232.1 /DEF = Homo sapiens EphA1 | 205977_s_at |
| | (EPHA1), mRNA. /FEA = mRNA /GEN = EPHA1 | |
| | /PROD = EphA1 /DB_XREF = gi: 4885208 | |
| | /UG = Hs.89839 EphA1 /FL = gb: M18391.1 | |
| | gb: NM_005232.1 | |
| spondin 1, (f- | Consensus includes gb: AI885290 /FEA = EST | 213994_s_at |
| spondin) | /DB_XREF = gi: 5590454 | |
| extracellular | /DB_XREF = est: w192a04.x1 | |
| matrix protein | /CLONE = IMAGE: 2432334 /UG = Hs.5378 | |
| | spondin 1, (f-spondin) extracellular matrix | |
| | protein | |
| CUG triplet | gb: NM_006561.1 /DEF = Homo sapiens CUG | 202158_s_at |
| repeat, RNA- | triplet repeat, RNA-binding protein 2 | |
| binding protein 2 | (CUGBP2), mRNA. /FEA = mRNA | |
| | /GEN = CUGBP2 /PROD = CUG triplet repeat, | |
| | RNA-binding protein 2 /DB_XREF = gi: 5729815 | |
| | /UG = Hs.211610 CUG triplet repeat, RNA- | |
| | binding protein 2 /FL = gb: U69546.1 | |
| | gb: AF036956.1 gb: AF090694.1 | |
| | gb: NM_006561.1 | |
| DKFZP434C091 | Consensus includes gb: AL080170.1 | 215047_at |
| protein | /DEF = Homo sapiens mRNA; cDNA | |
| | DKFZp434C091 (from clone DKFZp434C091); | |
| | partial cds. /FEA = mRNA | |
| | /GEN = DKFZp434C091 /PROD = hypothetical | |
| | protein /DB_XREF = gi: 5262639 /UG = Hs.51692 | |
| | DKFZP434C091 protein | |
| mucin 3B | Consensus includes gb: AF113616 /DEF = Homo | 214676_x_at |
| | sapiens intestinal mucin 3 (MUC3) gene, partial | |
| | cds /FEA = mRNA /DB_XREF = gi: 6466800 | |
| | /UG = Hs.129782 mucin 3A, intestinal | |
| potassium | gb: U90065.1 /DEF = Human potassium channel | 204678_s_at |
| channel, | KCNO1 mRNA, complete cds. /FEA = mRNA | |
| subfamily K, | /PROD = potassium channel KCNO1 | |
| member 1 | /DB_XREF = gi: 1916294 /UG = Hs.79351 | |
| (TWIK-1) | potassium channel, subfamily K, member 1 | |
| | (TWIK-1) /FL = gb: U33632.1 gb: U90065.1 | |
| | gb: U76996.1 gb: NM_002245.1 | |
| nuclear receptor | gb: NM_000901.1 /DEF = Homo sapiens nuclear | 205259_at |
| subfamily 3, | receptor subfamily 3, group C, member 2 | |
| group C, member 2 | (NR3C2), mRNA. /FEA = mRNA /GEN = NR3C2 | |
| | /PROD = nuclear receptor subfamily 3, group C, | |
| | member 2 /DB_XREF = gi: 4505198 | |
| | /UG = Hs.1790 nuclear receptor subfamily 3, | |
| | group C, member 2 /FL = gb: M16801.1 | |
| | gb: NM_000901.1 | |
| BTG family, | gb: NM_006763.1 /DEF = Homo sapiens BTG | 201236_s_at |
| member 2 | family, member 2 (BTG2), mRNA. | |
| | /FEA = mRNA /GEN = BTG2 /PROD = BTG | |
| | family, member 2 /DB_XREF = gi: 5802987 | |
| | /UG = Hs.75462 BTG family, member 2 | |
| | /FL = gb: U72649.1 gb: NM_006763.1 | |
| G protein- | gb: AF062006.1 /DEF = Homo sapiens orphan G | 210393_at |
| coupled receptor | protein-coupled receptor HG38 mRNA, | |
| 49 | complete cds. /FEA = mRNA /PROD = orphan G | |
| | protein-coupled receptor HG38 | |
| | /DB_XREF = gi: 3366801 /UG = Hs.285529 G | |
| | protein-coupled receptor 49 /FL = gb: AF062006.1 | |
| | gb: AF061444.1 gb: NM_003667.1 | |
| hypothetical | gb: NM_017640.1 /DEF = Homo sapiens | 219573_at |
| protein | hypothetical protein FLJ20048 (FLJ20048), | |
| FLJ20048 | mRNA. /FEA = mRNA /GEN = FLJ20048 | |
| | /PROD = hypothetical protein FLJ20048 | |
| | /DB_XREF = gi: 8923056 /UG = Hs.116470 | |
| | hypothetical protein FLJ20048 | |
| | /FL = gb: NM_017640.1 | |
| cytochrome | gb: NM_000775.1 /DEF = Homo sapiens | 205073_at |
| P450, subfamily | cytochrome P450, subfamily IIJ (arachidonic | |
| IIJ (arachidonic | acid epoxygenase) polypeptide 2 (CYP2J2), | |
| acid | mRNA. /FEA = mRNA /GEN = CYP2J2 | |
| epoxygenase) | /PROD = cytochrome P450, subfamily IIJ | |
| polypeptide 2 | (arachidonic acidepoxygenase) polypeptide 2 | |
| | /DB_XREF = gi: 4503226 /UG = Hs.152096 | |
| | cytochrome P450, subfamily IIJ (arachidonic | |
| | acid epoxygenase) polypeptide 2 | |
| | /FL = gb: U37143.1 gb: NM_000775.1 | |
| brain-specific | gb: NM_007030.1 /DEF = Homo sapiens brain- | 206179_s_at |
| protein p25 alpha | specific protein p25 alpha (p25), mRNA. | |
| | /FEA = mRNA /GEN = p25 /PROD = brain-specific | |
| | protein p25 alpha /DB_XREF = gi: 5902017 | |
| | /UG = Hs.29353 brain-specific protein p25 alpha | |
| | /FL = gb: AB017016.1 gb: NM_007030.1 | |
| mucin 2, | gb: NM_002457.1 /DEF = Homo sapiens mucin 2, | 204673_at |
| intestinal/trachea 1 | intestinaltracheal (MUC2), mRNA. | |
| | /FEA = mRNA /GEN = MUC2 /PROD = mucin 2, | |
| | intestinaltracheal /DB_XREF = gi: 4505284 | |
| | /UG = Hs.315 mucin 2, intestinaltracheal | |
| | /FL = gb: NM_002457.1 gb: L21998.1 | |
| hypothetical | gb: NM_017699.1 /DEF = Homo sapiens | 219734_at |
| protein | hypothetical protein FLJ20174 (FLJ20174), | |
| FLJ20174 | mRNA. /FEA = mRNA /GEN = FLJ20174 | |
| | /PROD = hypothetical protein FLJ20174 | |
| | /DB_XREF = gi: 8923170 /UG = Hs.114556 | |
| | hypothetical protein FLJ20174 | |
| | /FL = gb: NM_017699.1 | |
| metastasis- | gb: NM_004739.1 /DEF = Homo sapiens | 203444_s_at |
| associated 1-like 1 | metastasis-associated 1-like 1 (MTA1L1), | |
| | mRNA. /FEA = mRNA /GEN = MTA1L1 | |
| | /PROD = metastasis-associated 1-like 1 | |
| | /DB_XREF = gi: 4758739 /UG = Hs.173043 | |
| | metastasis-associated 1-like 1 | |
| | /FL = gb: AB016591.1 gb: NM_004739.1 | |
| | gb: AF295807.1 | |
| bone | gb: NM_001200.1 /DEF = Homo sapiens bone | 205290_s_at |
| morphogenetic | morphogenetic protein 2 (BMP2), mRNA. | |
| protein 2 | /FEA = mRNA /GEN = BMP2 /PROD = bone | |
| | morphogenetic protein 2 precursor | |
| | /DB_XREF = gi: 4557368 /UG = Hs.73853 bone | |
| | morphogenetic protein 2 /FL = gb: NM_001200.1 | |
| heparanase | gb: NM_006665.1 /DEF = Homo sapiens | 219403_s_at |
| | heparanase (HPSE), mRNA. /FEA = mRNA | |
| | /GEN = HPSE /PROD = heparanase | |
| | /DB_XREF = gi: 5729872 /UG = Hs.44227 | |
| | heparanase /FL = gb: AF165154.1 gb: AF152376.1 | |
| | gb: NM_006665.1 gb: AF084467.1 | |
| | gb: AF155510.1 | |
| tumor necrosis | gb: BC002794.1 /DEF = Homo sapiens, tumor | 209354_at |
| factor receptor | necrosis factor receptor superfamily, member 14 | |
| superfamily, | (herpesvirus entry mediator), clone MGC: 3753, | |
| member 14 | mRNA, complete cds. /FEA = mRNA | |
| (herpesvirus | /PROD = tumor necrosis factor receptor | |
| entry mediator) | superfamily, member 14 (herpesvirus entry | |
| | mediator) /DB_XREF = gi: 12803894 | |
| | /UG = Hs.279899 tumor necrosis factor receptor | |
| | superfamily, member 14 (herpesvirus entry | |
| | mediator) /FL = gb: BC002794.1 gb: U70321.1 | |
| | gb: U81232.1 gb: NM_003820.1 gb: AF153978.1 | |
| CUG triplet | Consensus includes gb: N36839 /FEA = EST | 202156_s_at |
| repeat, RNA- | /DB_XREF = gi: 1157981 | |
| binding protein 2 | /DB_XREF = est: yy35f07.s1 | |
| | /CLONE = IMAGE: 273253 /UG = Hs.211610 | |
| | CUG triplet repeat, RNA-binding protein 2 | |
| | /FL = gb: U69546.1 gb: AF036956.1 | |
| | gb: AF090694.1 gb: NM_006561.1 | |
| ESTs, | Consensus includes gb: R06655 /FEA = EST | 217546_at |
| Moderately | /DB_XREF = gi: 757275 | |
| similar to | /DB_XREF = est: yf10e02.r1 | |
| AF078844 1 | /CLONE = IMAGE: 126458 /UG = Hs.188518 | |
| hqp0376 protein | ESTs, Moderately similar to AF078844 1 | |
| [H. sapiens] | hqp0376 protein H. sapiens | |
| hairless (mouse) | gb: NM_018411.1 /DEF = Homo sapiens hairless | 220163_s_at |
| homolog | protein (putative single zinc finger transcription | |
| | factor protein, responsible for autosomal | |
| | recessive universal congenital alopecia, HR | |
| | gene) (HSA277165), mRNA. /FEA = mRNA | |
| | /GEN = HSA277165 /PROD = hairless protein | |
| | /DB_XREF = gi: 11036651 /UG = Hs.272367 | |
| | hairless protein (putative single zinc finger | |
| | transcription factor protein, responsible for | |
| | autosomal recessive universal congenital | |
| | alopecia, HR gene) /FL = gb: NM_018411.1 | |
| branched chain | Consensus includes gb: NM_005504.1 | 214452_at |
| aminotransferase | /DEF = Homo sapiens branched chain | |
| 1, cytosolic | aminotransferase 1, cytosolic (BCAT1), mRNA. | |
| | /FEA = CDS /GEN = BCAT1 /PROD = branched | |
| | chain aminotransferase 1, cytosolic | |
| | /DB_XREF = gi: 5031606 /UG = Hs.157205 | |
| | branched chain aminotransferase 1, cytosolic | |
| | /FL = gb: U21551.1 gb: NM_005504.1 | |
| pancreas- | gb: NM_016341.1 /DEF = Homo sapiens | 205112_at |
| enriched | pancreas-enriched phospholipase C | |
| phospholipase C | (LOC51196), mRNA. /FEA = mRNA | |
| | /GEN = LOC51196 /PROD = pancreas-enriched | |
| | phospholipase C /DB_XREF = gi: 7705940 | |
| | /UG = Hs.6733 pancreas-enriched phospholipase | |
| | C /FL = gb: AF190642.2 gb: AF117948.1 | |
| | gb: NM_016341.1 | |
| prostaglandin- | gb: NM_000963.1 /DEF = Homo sapiens | 204748_at |
| endoperoxide | prostaglandin-endoperoxide synthase 2 | |
| synthase 2 | (prostaglandin GH synthase and | |
| (prostaglandin | cyclooxygenase) (PTGS2), mRNA. | |
| G/H synthase | /FEA-mRNA /GEN = PTGS2 | |
| and | /PROD = prostaglandin-endoperoxide synthase | |
| cyclooxygenase) | 2(prostaglandin GH synthase and | |
| | cyclooxygenase) /DB_XREF = gi: 4506264 | |
| | /UG = Hs.196384 prostaglandin-endoperoxide | |
| | synthase 2 (prostaglandin GH synthase and | |
| | cyclooxygenase) /FL = gb: M90100.1 | |
| | gb: L15326.1 gb: NM_000963.1 | |
| phosphatase and | gb: NM_000314.1 /DEF = Homo sapiens | 204054_at |
| tensin homolog | phosphatase and tensin homolog (mutated in | |
| (mutated in | multiple advanced cancers 1) (PTEN), mRNA. | |
| multiple | /FEA = mRNA /GEN = PTEN | |
| advanced cancers | /PROD = phosphatase and tensin homolog | |
| 1) | (mutated inmultiple advanced cancers 1) | |
| | /DB_XREF = gi: 4506248 /UG = Hs.10712 | |
| | phosphatase and tensin homolog (mutated in | |
| | multiple advanced cancers 1) /FL = gb: U92436.1 | |
| | gb: U93051.1 gb: U96180.1 gb: NM_000314.1 | |
| retinoic acid | Consensus includes gb: AI669229 /FEA = EST | 221872_at |
| receptor | /DB_XREF = gi: 4834003 | |
| responder | /DB_XREF = est: wc13e06.x1 | |
| (tazarotene | /CLONE = IMAGE: 2315074 /UG = Hs.82547 | |
| induced) 1 | retinoic acid receptor responder (tazarotene | |
| | induced) 1 | |
| protease inhibitor | gb: NM_002638.1 /DEF = Homo sapiens protease | 203691_at |
| 3, skin-derived | inhibitor 3, skin-derived (SKALP) (PI3), mRNA. | |
| (SKALP) | /FEA = mRNA /GEN = PI3 /PROD = protease | |
| | inhibitor 3, skin-derived (SKALP) | |
| | /DB_XREF = gi: 4505786 /UG = Hs.112341 | |
| | protease inhibitor 3, skin-derived (SKALP) | |
| | /FL = gb: NM_002638.1 | |
| zinc finger | gb: NM_003438.1 /DEF = Homo sapiens zinc | 207394_at |
| protein 137 | finger protein 137 (clone pHZ-30) (ZNF137), | |
| (clone pHZ-30) | mRNA. /FEA = mRNA /GEN = ZNF137 | |
| | /PROD = zinc finger protein 137 (clone pHZ-30) | |
| | /DB_XREF = gi: 4507988 /UG = Hs.151689 zinc | |
| | finger protein 137 (clone pHZ-30) | |
| | /FL = gb: NM_003438.1 gb: U09414.1 | |
| myosin, light | gb: NM_002477.1 /DEF = Homo sapiens myosin, | 205145_s_at |
| polypeptide 5, | light polypeptide 5, regulatory (MYL5), mRNA. | |
| regulatory | /FEA = mRNA /GEN = MYL5 /PROD = myosin, | |
| | light polypeptide 5, regulatory | |
| | /DB_XREF = gi: 4505304 /UG = Hs.170482 | |
| | myosin, light polypeptide 5, regulatory | |
| | /FL = gb: L03785.1 gb: NM_002477.1 | |
| tumor necrosis | gb: NM_000043.1 /DEF = Homo sapiens tumor | 204781_s_at |
| factor receptor | necrosis factor receptor superfamily, member 6 | |
| superfamily, | (TNFRSF6), mRNA. /FEA = mRNA | |
| member 6 | /GEN = TNFRSF6 /PROD = apoptosis (APO-1) | |
| | antigen 1 /DB_XREF = gi: 4507582 | |
| | /UG = Hs.82359 tumor necrosis factor receptor | |
| | superfamily, member 6 /FL = gb: M67454.1 | |
| | gb: NM_000043.1 | |
| hypothetical | Consensus includes gb: AI339568 /FEA = EST | 222727_s_at |
| protein | /DB_XREF = gi: 4076495 | |
| FLJ22233 | /DB_XREF = est: qk67e10.x1 | |
| | /CLONE = IMAGE: 1874058 /UG = Hs.286194 | |
| | hypothetical protein FLJ22233 | |
| | /FL = gb: NM_024959.1 | |
| regenerating | gb: AY007243.1 /DEF = Homo sapiens | 223447_at |
| gene type IV | regenerating gene type IV mRNA, complete | |
| | cds. /FEA = mRNA /PROD = regenerating gene | |
| | type IV /DB_XREF = gi: 12621025 | |
| | /UG = Hs.105484 Homo sapiens regenerating | |
| | gene type IV mRNA, complete cds | |
| | /FL = gb: AY007243.1 | |
| Homo sapiens | Consensus includes gb: AK025615.1 | 225285_at |
| cDNA: | /DEF = Homo sapiens cDNA: FLJ21962 fis, | |
| FLJ21962 fis, | clone HEP05564. /FEA = mRNA | |
| clone HEP05564 | /DB_XREF = gi: 10438186 /UG = Hs.7567 Homo | |
| | sapiens cDNA: FLJ21962 fis, clone HEP05564 | |
| phosphoprotein | Consensus includes gb: AK000680.1 | 225626_at |
| associated with | /DEF = Homo sapiens cDNA FLJ20673 fis, | |
| glycosphingolipi | clone KAIA4464. /FEA = mRNA | |
| d-enriched | /DB_XREF = gi: 7020924 /UG = Hs.266175 | |
| microdomains | phosphoprotein associated with GEMs | |
| | /FL = gb: AF240634.1 gb: NM_018440.1 | |
| hypothetical | Consensus includes gb: BF111925 /FEA = EST | 226171_at |
| protein | /DB_XREF = gi: 10941704 | |
| FLJ20209 | /DB_XREF = est: 7138g05.x1 | |
| | /CLONE = IMAGE: 3523784 /UG = Hs.3685 | |
| | hypothetical protein FLJ20209 | |
| Homo sapiens | Consensus includes gb: AA532640 /FEA = EST | 226484_at |
| mRNA for | /DB_XREF = gi: 2276894 | |
| KIAA1190 | /DB_XREF = est: nj17c04.s1 | |
| protein, partial | /CLONE = IMAGE: 986598 /UG = Hs.206259 | |
| cds | Homo sapiens mRNA for KIAA1190 protein, | |
| | partial cds | |
| KIAA1543 | Consensus includes gb: AB040976.1 | 226494_at |
| protein | /DEF = Homo sapiens mRNA for KIAA1543 | |
| | protein, partial cds. /FEA = mRNA | |
| | /GEN = KIAA1543 /PROD = KIAA1543 protein | |
| | /DB_XREF = gi: 7959352 /UG = Hs.17686 | |
| | KIAA1543 protein | |
| hypothetical | Consensus includes gb: AW138767 /FEA = EST | 227180_at |
| protein | /DB_XREF = gi: 6143085 /DB_XREF = est: UI-H- | |
| FLJ23563 | BI1-aep-a-12-0-UI.s1 | |
| | /CLONE = IMAGE: 2719799 /UG = Hs.274256 | |
| | hypothetical protein FLJ23563 | |
| ESTs | Consensus includes gb: AW264333 /FEA = EST | 227320_at |
| | /DB_XREF = gi: 6641075 | |
| | /DB_XREF = est: xq98e01.x1 | |
| | /CLONE = IMAGE: 2758680 /UG = Hs.21835 | |
| | ESTs | |
| ESTs | Consensus includes gb: BF589359 /FEA = EST | 227354_at |
| | /DB_XREF = gi: 11681683 | |
| | /DB_XREF = est: nab25d01.x1 | |
| | /CLONE = IMAGE: 3266737 /UG = Hs.13256 | |
| | ESTs | |
| Homo sapiens, | Consensus includes gb: AW001287 /FEA = EST | 227676_at |
| Similar to | /DB_XREF = gi: 5848203 | |
| RIKEN cDNA | /DB_XREF = est: wu27e06.x1 | |
| 1810037C20 | /CLONE = IMAGE: 2521282 /UG = Hs.61265 | |
| gene, clone | ESTs, Weakly similar to G786_HUMAN | |
| MGC: 21481 | PROTEIN GS3786 H. sapiens | |
| IMAGE: 3852062, | | |
| mRNA, | | |
| complete cds | | |
| Homo sapiens | Consensus includes gb: T86159 /FEA = EST | 227724_at |
| cDNA: | /DB_XREF = gi: 714511 | |
| FLJ22063 fis, | /DB_XREF = est: yd84h07.s1 | |
| clone HEP10326 | /CLONE = IMAGE: 114973 /UG = Hs.10450 | |
| | Homo sapiens cDNA: FLJ22063 fis, clone | |
| | HEP10326 | |
| ESTs | Consensus includes gb: AI700341 /FEA = EST | 228653_at |
| | /DB_XREF = gi: 4988241 | |
| | /DB_XREF = est: wd06e10.x1 | |
| | /CLONE = IMAGE: 2327370 /UG = Hs.110406 | |
| | ESTs | |
| ESTs | Consensus includes gb: BG494007 /FEA = EST | 228716_at |
| | /DB_XREF = gi: 13455521 | |
| | /DB_XREF = est: 602542289F1 | |
| | /CLONE = IMAGE: 4673182 /UG = Hs.203213 | |
| | ESTs | |
| ESTs | Consensus includes gb: AI559300 /FEA = EST | 229331_at |
| | /DB_XREF = gi: 4509505 | |
| | /DB_XREF = est: tq43d03.x1 | |
| | /CLONE = IMAGE: 2211557 /UG = Hs.294140 | |
| | ESTs | |
| hypothetical | Consensus includes gb: AI830823 /FEA = EST | 229439_s_at |
| protein | /DB_XREF = gi: 5451416 | |
| | /DB_XREF = est: wj52b06.x1 | |
| | /CLONE = IMAGE: 2406419 /UG = Hs.95549 | |
| | hypothetical protein | |
| ESTs | Consensus includes gb: BF431989 /FEA = EST | 229657_at |
| | /DB_XREF = gi: 11444103 | |
| | /DB_XREF = est: nab84a05.x1 | |
| | /CLONE = IMAGE: 3274280 /UG = Hs.203213 | |
| | ESTs | |
| ESTs | Consensus includes gb: BF589413 /FEA = EST | 229893_at |
| | /DB_XREF = gi: 11681737 | |
| | /DB_XREF = est: nab26b11.x1 | |
| | /CLONE = IMAGE: 3267020 /UG = Hs.55501 | |
| | ESTs | |
| brain-specific | Consensus includes gb: BG055052 /FEA = EST | 230104_s_at |
| protein p25 alpha | /DB_XREF = gi: 12512386 | |
| | /DB_XREF = est: nac94g06.x1 | |
| | /CLONE = IMAGE: 3441995 /UG = Hs.29353 | |
| | brain-specific protein p25 alpha | |
| ESTs, Weakly | Consensus includes gb: BF110588 /FEA = EST | 230645_at |
| similar to | /DB_XREF = gi: 10940278 | |
| MMHUE4 | /DB_XREF = est: 7n39e12.x1 | |
| erythrocyte | /CLONE = IMAGE: 3567071 /UG = Hs.150478 | |
| membrane | ESTs, Weakly similar to KIAA0987 protein | |
| protein 4.1, | H. sapiens | |
| parent splice | | |
| form [H. sapiens] | | |
| ESTs | Consensus includes gb: BF592062 /FEA = EST | 230760_at |
| | /DB_XREF = gi: 11684386 | |
| | /DB_XREF = est: 7n98h06.x1 | |
| | /CLONE = IMAGE: 3572962 /UG = Hs.233890 | |
| | ESTs | |
| hepatocyte | Consensus includes gb: AI032108 /FEA = EST | 230914_at |
| nuclear factor 4, | /DB_XREF = gi: 3250320 | |
| alpha | /DB_XREF = est: ow92d11.x1 | |
| | /CLONE = IMAGE: 1654293 /UG = Hs.54424 | |
| | hepatocyte nuclear factor 4, alpha | |
| ESTs | Consensus includes gb: AW203959 /FEA = EST | 230944_at |
| | /DB_XREF = gi: 6503431 /DB_XREF = est: UI-H- | |
| | BIl-aeu-b-12-0-UI.s1 | |
| | /CLONE = IMAGE: 2720590 /UG = Hs.149532 | |
| | ESTs | |
| ESTs | Consensus includes gb: AI139990 /FEA = EST | 231022_at |
| | /DB_XREF = gi: 3647447 | |
| | /DB_XREF = est: qa47d03.x1 | |
| | /CLONE = IMAGE: 1689893 /UG = Hs.134586 | |
| | ESTs | |
| ESTs | Consensus includes gb: AI806131 /FEA = EST | 231148_at |
| | /DB_XREF = gi: 5392697 | |
| | /DB_XREF = est: wf06c06.x1 | |
| | /CLONE = IMAGE: 2349802 /UG = Hs.99376 | |
| | ESTs | |
| hypothetical | Consensus includes gb: AB046810.1 | 232083_at |
| protein | /DEF = Homo sapiens mRNA for KIAA1590 | |
| FLJ23045 | protein, partial cds. /FEA = mRNA | |
| | /GEN = KIAA1590 /PROD = KIAA1590 protein | |
| | /DB_XREF = gi: 10047254 /UG = Hs.101774 | |
| | hypothetical protein FLJ323045 | |
| Homo sapiens | Consensus includes gb: AC004908 /DEF = Homo | 232641_at |
| PAC clone RP5- | sapiens PAC clone RP5-855D21 /FEA = CDS_3 | |
| 855D21 | /DB_XREF = gi: 4156179 /UG = Hs.249181 | |
| | Homo sapiens PAC clone RP5-855D21 | |
| putative | Consensus includes gb: AJ251708.1 | 234669_x_at |
| microtubule- | /DEF = Homo sapiens partial mRNA for putative | |
| binding protein | microtubule-binding protein. /FEA = mRNA | |
| | /PROD = putative microtubule-binding protein | |
| | /DB_XREF = gi: 6491740 /UG = Hs.326544 | |
| | putative microtubule-binding protein | |
| ESTs | Consensus includes gb: AI741469 /FEA = EST | 234970_at |
| | /DB_XREF = gi: 5109757 | |
| | /DB_XREF = est: wg11b01.x1 | |
| | /CLONE = IMAGE: 2364745 /UG = Hs.57787 | |
| | ESTs | |
| ESTs | Consensus includes gb: AI417897 /FEA = EST | 235444_at |
| | /DB_XREF = gi: 4261401 | |
| | /DB_XREF = est: tg55b06.x1 | |
| | /CLONE = IMAGE: 2112659 /UG = Hs.235860 | |
| | ESTs | |
| ESTs | Consensus includes gb: AI493909 /FEA = EST | 235562_at |
| | /DB_XREF = gi: 4394912 | |
| | /DB_XREF = est: qz94e02.x1 | |
| | /CLONE = IMAGE: 2042234 /UG = Hs.6131 | |
| | ESTs | |
| ESTs | Consensus includes gb: AV741130 /FEA = EST | 235651_at |
| | /DB_XREF = gi: 10858711 | |
| | /DB_XREF = est: AV741130 | |
| | /CLONE = CBCATB06 /UG = Hs.173704 ESTs, | |
| | Moderately similar to ALU8_HUMAN ALU | |
| | SUBFAMILY SX SEQUENCE | |
| | CONTAMINATION WARNING ENTRY | |
| | H. sapiens | |
| ESTs | Consensus includes gb: AW339510 /FEA = EST | 235866_at |
| | /DB_XREF = gi: 6836136 | |
| | /DB_XREF = est: xz91h08.x1 | |
| | /CLONE = IMAGE: 2871615 /UG = Hs.42722 | |
| | ESTs | |
| ESTs | Consensus includes gb: AI076192 /FEA = EST | 236422_at |
| | /DB_XREF = gi: 3405370 | |
| | /DB_XREF = est: oz01g07.x1 | |
| | /CLONE = IMAGE: 1674108 /UG = Hs.131933 | |
| | ESTs | |
| ESTs | Consensus includes gb: AL044570 /FEA = EST | 236548_at |
| | /DB_XREF = gi: 5432785 | |
| | /DB_XREF = est: DKFZp434L082_s1 | |
| | /CLONE = DKFZp434L082 /UG = Hs.147975 | |
| | ESTs | |
| ESTs | Consensus includes gb: AI733801 /FEA = EST | 237923_at |
| | /DB_XREF = gi: 5054914 | |
| | /DB_XREF = est: qk39c04.x5 | |
| | /CLONE = IMAGE: 1871334 /UG = Hs.146186 | |
| | ESTs | |
| Homo sapiens, | Consensus includes gb: T69015 /FEA = EST | 238422_at |
| clone | /DB_XREF = gi: 680163 | |
| MGC: 16402 | /DB_XREF = est: yc31f04.s1 | |
| IMAGE: 39403606, | /CLONE = IMAGE: 82303 /UG = Hs.192728 | |
| mRNA, | ESTs | |
| complete cds | | |
| ESTs | Consensus includes gb: AA502384 /FEA = EST | 238956_at |
| | /DB_XREF = gi: 2237351 | |
| | /DB_XREF = est: ne27f11.s1 | |
| | /CLONE = IMAGE: 898605 /UG = Hs.151529 | |
| | ESTs | |
| ESTs | Consensus includes gb: AI739241 /FEA = EST | 238984_at |
| | /DB_XREF = gi: 5101222 | |
| | /DB_XREF = est: wi14h02.x1 | |
| | /CLONE = IMAGE: 2390259 /UG = Hs.171480 | |
| | ESTs | |
| ESTs | Consensus includes gb: AA088446 /FEA = EST | 239065_at |
| | /DB_XREF = gi: 1633958 | |
| | /DB_XREF = est: zl89f04.s1 | |
| | /CLONE = IMAGE: 511807 /UG = Hs.170298 | |
| | ESTs | |
| ESTs | Consensus includes gb: AI493046 /FEA = EST | 239148_at |
| | /DB_XREF = gi: 4394049 | |
| | /DB_XREF = est: qz49b04.x1 | |
| | /CLONE = IMAGE: 2030191 /UG = Hs.146133 | |
| | ESTs | |
| ESTs | Consensus includes gb: AI243098 /FEA = EST | 239966_at |
| | /DB_XREF = gi: 3838495 | |
| | /DB_XREF = est: qh26e03.x1 | |
| | /CLONE = IMAGE: 1845820 /UG = Hs.178398 | |
| | ESTs | |
| ESTs, Weakly | Consensus includes gb: AI633523 /FEA = EST | 240106_at |
| similar to | /DB_XREF = gi: 4684853 | |
| A49175 Motch B | /DB_XREF = est: th68b11.x1 | |
| protein - mouse | /CLONE = IMAGE: 2123805 /UG = Hs.44705 | |
| [M. musculus] | ESTs | |
| betacellulin | Consensus includes gb: AI620677 /FEA = EST | 241412_at |
| | /DB_XREF = gi: 4629803 | |
| | /DB_XREF = est: tu85e09.x1 | |
| | /CLONE = IMAGE: 2257864 /UG = Hs.154191 | |
| | ESTs | |
| ESTs | Consensus includes gb: BF696216 /FEA = EST | 242626_at |
| | /DB_XREF = gi: 11981624 | |
| | /DB_XREF = est: 602124536F1 | |
| | /CLONE = IMAGE: 4281632 /UG = Hs.188724 | |
| | ESTs | |
| ESTs | Consensus includes gb: N57929 /FEA = EST | 242978_x_at |
| | /DB_XREF = gi: 1201819 | |
| | /DB_XREF = est: yv61e06.s1 | |
| | /CLONE = IMAGE: 247234 /UG = Hs.48100 | |
| | ESTs | |
| ESTs, Weakly | Consensus includes gb: AI457984 /FEA = EST | 243729_at |
| similar to | /DB_XREF = gi: 4312002 | |
| ALU1_HUMAN | /DB_XREF = est: tj66a04.x1 | |
| ALU | /CLONE = IMAGE: 2146446 /UG = Hs.165900 | |
| SUBFAMILY J | ESTs, Weakly similar to ALUC_HUMAN !!!! | |
| SEQUENCE | ALU CLASS C WARNING ENTRY !!! | |
| CONTAMINATION | H. sapiens | |
| WARNING | | |
| ENTRY | | |
| [H. sapiens] | | |
| ESTs | Consensus includes gb: AA581439 /FEA = EST | 244650_at |
| | /DB_XREF = gi: 2359211 | |
| | /DB_XREF = est: nh13c10.s1 | |
| | /CLONE = IMAGE: 952242 /UG = Hs.152328 | |
| | ESTs | |

[0093] The two biomarker probe sets A and B were then combined, a total of 161 different probe sets, and the redundant polynucleotides were removed, representing 125 unique polynucleotides which are provided below in Table 4. The Table 4 polynucleotides are biomarkers of the invention.

TABLE 4
Biomarkers

| Unigene Title | | Affymetrix |
|---|---|---|
| And SEQ ID NO: | Affymetrix Description | probe set |
| 3-hydroxy-3- | gb: NM_005518.1 /DEF = Homo sapiens 3- | 204607_at |
| methylglutaryl- | hydroxy-3-methylglutaryl-Coenzyme A | |
| Coenzyme A | synthase 2 (mitochondrial) (HMGCS2), | |
| synthase 2 | mRNA. /FEA = mRNA /GEN = HMGCS2 | |
| (mitochondrial) | /PROD = 3-hydroxy-3-methylglutaryl- | |
| SEQ ID NOS: 1 | Coenzyme A synthase 2(mitochondrial) | |
| (DNA) and 126 | /DB_XREF = gi: 5031750 /UG = Hs.59889 3- | |
| (amino acid) | hydroxy-3-methylglutaryl-Coenzyme A | |
| | synthase 2 (mitochondrial) | |
| | /FL = gb: NM_005518.1 | |
| ATPase, Class V, | Consensus includes gb: AW006935 | 214070_s_at |
| type 10B | /FEA = EST /DB_XREF = gi: 5855713 | |
| | /DB_XREF = est: wt08b11.x1 | |
| SEQ ID NO: 2 | /CLONE = IMAGE: 2506845 /UG = Hs.109358 | |
| (DNA) | ATPase, Class V, type 10B | |
| bone morphogenetic | gb: NM_001200.1 /DEF = Homo sapiens bone | 205290_s_at |
| protein 2 | morphogenetic protein 2 (BMP2), mRNA. | |
| SEQ ID NOS: 3 | /FEA = mRNA /GEN = BMP2 /PROD = bone | |
| (DNA) and 127 | morphogenetic protein 2 precursor | |
| (amino acid) | /DB_XREF = gi: 4557368 /UG = Hs.73853 bone | |
| | morphogenetic protein 2 | |
| | /FL = gb: NM_001200.1 | |
| brain-specific protein | gb: NM_007030.1 /DEF = Homo sapiens brain- | 206179_s_at |
| p25 alpha | specific protein p25 alpha (p25), mRNA. | |
| SEQ ID NOS: 4 | /FEA = mRNA /GEN = p25 /PROD = brain- | |
| (DNA) and 128 | specific protein p25 alpha | |
| (amino acid) | /DB_XREF = gi: 5902017 /UG = Hs.29353 | |
| | brain-specific protein p25 alpha | |
| | /FL = gb: AB017016.1 gb: NM_007030.1 | |
| branched chain | Consensus includes gb: NM_005504.1 | 214452_at |
| aminotransferase 1, | /DEF = Homo sapiens branched chain | |
| cytosolic | aminotransferase 1, cytosolic (BCAT1), | |
| SEQ ID NOS: 5 | mRNA. /FEA = CDS /GEN = BCAT1 | |
| (DNA) and 129 | /PROD = branched chain aminotransferase 1, | |
| (amino acid) | cytosolic /DB_XREF = gi: 5031606 | |
| | /UG = Hs.157205 branched chain | |
| | aminotransferase 1, cytosolic | |
| | /FL = gb: U21551.1 gb: NM_005504.1 | |
| BTG family, member 2 | gb: NM_006763.1 /DEF = Homo sapiens BTG | 201236_s_at |
| SEQ ID NOS: 6 | family, member 2 (BTG2), mRNA. | |
| (DNA) and 130 | /FEA = mRNA /GEN = BTG2 /PROD = BTG | |
| (amino acid) | family, member 2 /DB_XREF = gi: 5802987 | |
| | /UG = Hs.75462 BTG family, member 2 | |
| | /FL = gb: U72649.1 gb: NM_006763.1 | |
| Carcinoembryonic | gb: BC005008.1 /DEF = Homo sapiens, | 203757_s_at |
| antigen-related cell | carcinoembryonic antigen-related cell | |
| adhesion molecule 6 | adhesion molecule 6 (non-specific cross | |
| (non-specific cross | reacting antigen), clone MGC: 10467, mRNA, | |
| reacting antigen) | complete cds. /FEA = mRNA | |
| SEQ ID NOS: 7 | /PROD = carcinoembryonic antigen-related | |
| (DNA) and 131 | cell adhesionmolecule 6 (non-specific cross | |
| (amino acid) | reacting antigen) /DB_XREF = gi: 13477106 | |
| | /UG = Hs.73848 carcinoembryonic antigen- | |
| | related cell adhesion molecule 6 (non-specific | |
| | cross reacting antigen) /FL = gb: BC005008.1 | |
| | gb: M18216.1 gb: M29541.1 gb: NM_002483.1 | |
| caspase 10, apoptosis- | gb: NM_001230.1 /DEF = Homo sapiens | 205467_at |
| related cysteine | caspase 10, apoptosis-related cysteine | |
| protease | protease (CASP10), mRNA. /FEA = mRNA | |
| SEQ ID NOS: 8 | /GEN = CASP10 /PROD = caspase 10, | |
| (DNA) and 132 | apoptosis-related cysteine protease | |
| (amino acid) | /DB_XREF = gi: 4502568 /UG = Hs.5353 | |
| | caspase 10, apoptosis-related cysteine | |
| | protease /FL = gb: U60519.1 gb: NM_001230.1 | |
| CUG triplet repeat, | gb: NM_006561.1 /DEF = Homo sapiens CUG | 202158_s_at |
| RNA-binding protein 2 | triplet repeat, RNA-binding protein 2 | |
| SEQ ID NOS: 9 | (CUGBP2), mRNA. /FEA = mRNA | |
| (DNA) and 133 | /GEN = CUGBP2 /PROD = CUG triplet repeat, | |
| (amino acid) | RNA-binding protein 2 | |
| | /DB_XREF = gi: 5729815 /UG = Hs.211610 | |
| | CUG triplet repeat, RNA-binding protein 2 | |
| | /FL = gb: U69546.1 gb: AF036956.1 | |
| | gb: AF090694.1 gb: NM_006561.1 | |
| cystatin S | gb: NM_001899.1 /DEF = Homo sapiens | 206994_at |
| SEQ ID NOS: 10 | cystatin S (CST4), mRNA. /FEA = mRNA | |
| (DNA) and 134 | /GEN = CST4 /PROD = cystatin S | |
| (amino acid) | /DB_XREF = gi: 4503108 /UG = Hs.56319 | |
| | cystatin S /FL = gb: NM_001899.1 | |
| cystic fibrosis | gb: NM_000492.2 /DEF = Homo sapiens cystic | 205043_at |
| transmembrane | fibrosis transmembrane conductance | |
| conductance | regulator, ATP-binding cassette (sub-family | |
| regulator, ATP- | C, member 7) (CFTR), mRNA. | |
| binding cassette (sub- | /FEA = mRNA /GEN = CFTR /PROD = cystic | |
| family C, member 7) | fibrosis transmembrane conductanceregulator, | |
| SEQ ID NOS: 11 | ATP-binding cassette (sub-family C, member | |
| (DNA) and 135 | 7) /DB_XREF = gi: 6995995 /UG = Hs.663 | |
| (amino acid) | cystic fibrosis transmembrane conductance | |
| | regulator, ATP-binding cassette (sub-family | |
| | C, member 7) /FL = gb: NM_000492.2 | |
| cytochrome P450, | gb: NM_000775.1 /DEF = Homo sapiens | 205073_at |
| subfamily IIJ | cytochrome P450, subfamily IIJ (arachidonic | |
| (arachidonic acid | acid epoxygenase) polypeptide 2 (CYP2J2), | |
| epoxygenase) | mRNA. /FEA = mRNA /GEN = CYP2J2 | |
| polypeptide 2 | /PROD = cytochrome P450, subfamily IIJ | |
| SEQ ID NOS: 12 | (arachidonic acidepoxygenase) polypeptide 2 | |
| (DNA) and 136 | /DB_XREF = gi: 4503226 /UG = Hs.152096 | |
| (amino acid) | cytochrome P450, subfamily IIJ (arachidonic | |
| | acid epoxygenase) polypeptide 2 | |
| | /FL = gb: U37143.1 gb: NM_000775.1 | |
| dipeptidylpeptidase | gb: M80536.1 /DEF = H. sapiens dipeptidylpeptidase | 203716_s_at |
| IV (CD26, adenosine | IV (DPP4) mRNA, complete cds. | |
| deaminase | /FEA = mRNA /GEN = DPP4 | |
| complexing protein 2) | /PROD = dipeptidyl peptidase IV | |
| SEQ ID NOS 13 | /DB_XREF = gi: 181569 /UG = Hs.44926 | |
| (DNA) and 137 | dipeptidylpeptidase IV (CD26, adenosine | |
| (amino acid) | deaminase complexing protein 2) | |
| | /FL = gb: M80536.1 gb: NM_001935.1 | |
| DKFZP434C091 | Consensus includes gb: AL080170.1 | 215047_at |
| protein | /DEF = Homo sapiens mRNA; cDNA | |
| SEQ ID NO: 14 | DKFZp434C091 (from clone | |
| (DNA) | DKFZp434C091); partial cds. /FEA = mRNA | |
| | /GEN = DKFZp434C091 /PROD = hypothetical | |
| | protein /DB_XREF = gi: 5262639 | |
| | /UG = Hs.51692 DKFZP434C091 protein | |
| dopa decarboxylase | Consensus includes gb: AW772056 | 214347_s_at |
| (aromatic L-amino | /FEA = EST /DB_XREF = gi: 7704118 | |
| acid decarboxylase) | /DB_XREF = est: hn64g06.x1 | |
| SEQ ID NO: 15 | /CLONE = IMAGE: 3032698 /UG = Hs.150403 | |
| (DNA) | dopa decarboxylase (aromatic L-amino acid | |
| | decarboxylase) | |
| EphA1 | gb: NM_005232.1 /DEF = Homo sapiens | 205977_s_at |
| SEQ ID NOS: 16 | EphA1 (EPHA1), mRNA. /FEA = mRNA | |
| (DNA) and 138 | /GEN = EPHA1 /PROD = EphA1 | |
| (amino acid) | /DB_XREF = gi: 4885208 /UG = Hs.89839 | |
| | EphA1 /FL = gb: M18391.1 gb: NM_005232.1 | |
| ESTs, Moderately | Consensus includes gb: R06655 /FEA = EST | 217546_at |
| similar to AF078844 | /DB_XREF = gi: 757275 | |
| 1 hqp0376 protein | /DB_XREF = est: yf10e02.r1 | |
| [H. sapiens] | /CLONE = IMAGE: 126458 /UG = Hs.188518 | |
| SEQ ID NO: 17 | ESTs, Moderately similar to AF078844 1 | |
| (DNA) | hqp0376 protein H. sapiens | |
| ESTs, Weakly similar | Consensus includes gb: AW675655 | 222354_at |
| to I38022 | /FEA = EST /DB_XREF = gi: 7540890 | |
| hypothetical protein | /DB_XREF = est: ba52e01.x1 | |
| [H. sapiens] | /CLONE = IMAGE: 2900184 /UG = Hs.314158 | |
| SEQ ID NO: 18 | ESTs | |
| (DNA) | | |
| fibroblast growth | gb: NM_022969.1 /DEF = Homo sapiens | 203638_s_at |
| factor receptor 2 | fibroblast growth factor receptor 2 (bacteria- | |
| (bacteria-expressed | expressed kinase, keratinocyte growth factor | |
| kinase, keratinocyte | receptor, craniofacial dysostosis 1, Crouzon | |
| growth factor | syndrome, Pfeiffer syndrome, Jackson-Weiss | |
| receptor, craniofacial | syndrome) (FGFR2), transcript variant 2, | |
| dysostosis 1, Crouzon | mRNA. /FEA = mRNA /GEN = FGFR2 | |
| syndrome, Pfeiffer | /PROD = fibroblast growth factor receptor 2, | |
| syndrome, Jackson- | isoform 2precursor /DB_XREF = gi: 13186252 | |
| Weiss syndrome) | /UG = Hs.278581 fibroblast growth factor | |
| SEQ ID NOS: 19 | receptor 2 (bacteria-expressed kinase, | |
| (DNA) and 139 | keratinocyte growth factor receptor, | |
| (amino acid) | craniofacial dysostosis 1, Crouzon syndrome, | |
| | Pfeiffer syndrome, Jackson-Weiss syndrome) | |
| | /FL = gb: NM_022969.1 gb: M97193.1 | |
| | gb: M80634.1 | |
| FXYD domain- | gb: BC005238.1 /DEF = Homo sapiens, FXYD | 202489_s_at |
| containing ion | domain-containing ion transport regulator 3, | |
| transport regulator 3 | clone MGC: 12265, mRNA, complete cds. | |
| SEQ ID NOS: 20 | /FEA = mRNA /PROD = FXYD domain- | |
| (DNA) and 140 | containing ion transport regulator3 | |
| (amino acid) | /DB_XREF = gi: 13528881 /UG = Hs.301350 | |
| | FXYD domain-containing ion transport | |
| | regulator 3 /FL = gb: NM_005971.2 | |
| | gb: BC005238.1 | |
| G protein-coupled | gb: AF062006.1 /DEF = Homo sapiens orphan | 210393_at |
| receptor 49 | G protein-coupled receptor HG38 mRNA, | |
| SEQ ID NOS: 21 | complete cds. /FEA = mRNA /PROD = orphan | |
| (DNA) and 141 | G protein-coupled receptor HG38 | |
| (amino acid) | /DB_XREF = gi: 3366801 /UG = Hs.285529 G | |
| | protein-coupled receptor 49 | |
| | /FL = gb: AF062006.1 gb: AF061444.1 | |
| | gb: NM_003667.1 | |
| hairless (mouse) | gb: NM_018411.1 /DEF = Homo sapiens | 220163_s_at |
| homolog | hairless protein (putative single zinc finger | |
| SEQ ID NOS: 22 | transcription factor protein, responsible for | |
| (DNA) and 142 | autosomal recessive universal congenital | |
| (amino acid) | alopecia, HR gene) (HSA277165), mRNA. | |
| | /FEA = mRNA /GEN = HSA277165 | |
| | /PROD = hairless protein | |
| | /DB_XREF = gi: 11036651 /UG = Hs.272367 | |
| | hairless protein (putative single zinc finger | |
| | transcription factor protein, responsible for | |
| | autosomal recessive universal congenital | |
| | alopecia, HR gene) /FL = gb: NM_018411.1 | |
| hemoglobin, alpha 1 | gb: BC005931.1 /DEF = Homo sapiens, | 211745_x_at |
| SEQ ID NOS: 23 | hemoglobin, alpha 2, clone MGC: 14541, | |
| (DNA) and 143 | mRNA, complete cds. /FEA = mRNA | |
| (amino acid) | /PROD = hemoglobin, alpha 2 | |
| | /DB_XREF = gi: 13543547 | |
| | /FL = gb: BC005931.1 | |
| hemoglobin, alpha 2 | Consensus includes gb: T50399 /FEA = EST | 214414_x_at |
| SEQ ID NO: 24 | /DB_XREF = gi: 652259 | |
| (DNA) | /DB_XREF = est: yb30b11.s1 | |
| | /CLONE = IMAGE: 72669 /UG = Hs.251577 | |
| | hemoglobin, alpha 1 | |
| heparanase | gb: NM_006665.1 /DEF = Homo sapiens | 219403_s_at |
| SEQ ID NOS: 25 | heparanase (HPSE), mRNA. /FEA = mRNA | |
| (DNA) and 144 | /GEN = HPSE /PROD = heparanase | |
| (amino acid) | /DB_XREF = gi: 5729872 /UG = Hs.44227 | |
| | heparanase /FL = gb: AF165154.1 | |
| | gb: AF152376.1 gb: NM_006665.1 | |
| | gb: AF084467.1 gb: AF155510.1 | |
| Hermansky-Pudlak | Consensus includes gb: AL022313 | 217354_s_at |
| syndrome | /DEF = Human DNA sequence from clone | |
| SEQ ID NOS: 26 | RP5-1119A7 on chromosome 22q12.2-12.3 | |
| (DNA) and 145 | Contains the TXN2 gene for mitochondrial | |
| (amino acid) | thioredoxin, a novel gene, the EIF3S7 gene | |
| | for eukaryotic translation initiation factor 3 | |
| | subunit 7 (zeta, 6667 kD) (EIF3-P66), the | |
| | gene f . . . /FEA = CDS_3 | |
| | /DB_XREF = gi: 4200326 /UG = Hs.272270 | |
| | Human DNA sequence from clone RP5- | |
| | 1119A7 on chromosome 22q12.2-12.3 | |
| | Contains the TXN2 gene for mitochondrial | |
| | thioredoxin, a novel gene, the EIF3S7 gene | |
| | for eukaryotic translation initiation factor 3 | |
| | subunit 7 (zeta, 6667 kD) (EIF3-P66), the | |
| | gene for a nov | |
| HERV-H LTR- | gb: NM_007072.1 /DEF = Homo sapiens | 220812_s_at |
| associating 2 | HERV-H LTR-associating 2 (HHLA2), | |
| SEQ ID NOS: 27 | mRNA. /FEA = mRNA /GEN = HHLA2 | |
| (DNA) and 146 | /PROD = HERV-H LTR-associating 2 | |
| (amino acid) | /DB_XREF = gi: 5901963 /UG = Hs.252351 | |
| | HERV-H LTR-associating 2 | |
| | /FL = gb: AF126162.1 gb: NM_007072.1 | |
| Homo sapiens clone | Consensus includes gb: AW593996 | 213256_at |
| 24707 mRNA | /FEA = EST /DB_XREF = gi: 7281254 | |
| sequence | /DB_XREF = est: hg41g06.x1 | |
| SEQ ID NO: 28 | /CLONE = IMAGE: 2948218 /UG = Hs.124969 | |
| (DNA) | Homo sapiens clone 24707 mRNA sequence | |
| Homo sapiens | Consensus includes gb: AL049983.1 | 217288_at |
| mRNA; cDNA | /DEF = Homo sapiens mRNA; cDNA | |
| DKFZp564D042 | DKFZp564D042 (from clone | |
| (from clone | DKFZp564D042). /FEA = mRNA | |
| DKFZp564D042) | /DB_XREF = gi: 4884234 /UG = Hs.240136 | |
| SEQ ID NO: 29 | Homo sapiens mRNA; cDNA | |
| (DNA) | DKFZp564D042 (from clone | |
| | DKFZp564D042) | |
| hypothetical protein | gb: NM_017640.1 /DEF = Homo sapiens | 219573_at |
| FLJ20048 | hypothetical protein FLJ20048 (FLJ20048), | |
| SEQ ID NOS: 30 | mRNA. /FEA = mRNA /GEN = FLJ20048 | |
| (DNA) and 147 | /PROD = hypothetical protein FLJ20048 | |
| (amino acid) | /DB_XREF = gi: 8923056 /UG = Hs.116470 | |
| | hypothetical protein FLJ20048 | |
| | /FL = gb: NM_017640.1 | |
| hypothetical protein | gb: NM_017655.1 /DEF = Homo sapiens | 219970_at |
| FLJ20075 | hypothetical protein FLJ20075 (FLJ20075), | |
| SEQ ID NOS: 31 | mRNA. /FEA = mRNA /GEN = FLJ20075 | |
| (DNA) and 148 | /PROD = hypothetical protein FLJ20075 | |
| (amino acid) | /DB_XREF = gi: 8923083 /UG = Hs.205058 | |
| | hypothetical protein FLJ20075 | |
| | /FL = gb: NM_017655.1 | |
| interferon consensus | Consensus includes gb: AI073984 /FEA = EST | 204057_at |
| sequence binding | /DB_XREF = gi: 3400628 | |
| protein 1 | /DB_XREF = est: oy66c05.x1 | |
| SEQ ID NO: 32 | /CLONE = IMAGE: 1670792 /UG = Hs.14453 | |
| (DNA) | interferon consensus sequence binding protein | |
| | 1 /FL = gb: M91196.1 gb: NM_002163.1 | |
| KIAA0690 protein | Consensus includes gb: AK000238.1 | 216360_x_at |
| SEQ ID NO: 33 | /DEF = Homo sapiens cDNA FLJ20231 fis, | |
| (DNA) | clone COLF5511, highly similar to | |
| | AB014590 Homo sapiens mRNA for | |
| | KIAA0690 protein. /FEA = mRNA | |
| | /DB_XREF = gi: 7020188 /UG = Hs.60103 | |
| | KIAA0690 protein | |
| matrilin 3 | gb: NM_002381.2 /DEF = Homo sapiens | 206091_at |
| SEQ ID NOS: 34 | matrilin 3 (MATN3) precursor, mRNA. | |
| (DNA) and 149 | /FEA = mRNA /GEN = MATN3 | |
| (amino acid) | /PROD = matrilin 3 precursor | |
| | /DB_XREF = gi: 13518040 /UG = Hs.278461 | |
| | matrilin 3 /FL = gb: NM_002381.2 | |
| metastasis-associated | gb: NM_004739.1 /DEF = Homo sapiens | 203444_s_at |
| 1-like 1 | metastasis-associated 1-like 1 (MTA1L1), | |
| SEQ ID NOS: 35 | mRNA. /FEA = mRNA /GEN = MTA1L1 | |
| (DNA) and 150 | /PROD = metastasis-associated 1-like 1 | |
| (amino acid) | /DB_XREF = gi: 4758739 /UG = Hs.173043 | |
| | metastasis-associated 1-like 1 | |
| | /FL = gb: AB016591.1 gb: NM_004739.1 | |
| | gb: AF295807.1 | |
| mucin 2, | gb: NM_002457.1 /DEF = Homo sapiens mucin | 204673_at |
| intestinal/tracheal | 2, intestinaltracheal (MUC2), mRNA. | |
| SEQ ID NOS: 36 | /FEA = mRNA /GEN = MUC2 /PROD = mucin | |
| (DNA) and 151 | 2, intestinaltracheal /DB_XREF = gi: 4505284 | |
| (amino acid) | /UG = Hs.315 mucin 2, intestinaltracheal | |
| | /FL = gb: NM_002457.1 gb: L21998.1 | |
| mucin 3B | Consensus includes gb: AB038783.1 | 214898_x_at |
| SEQ ID NOS: 37 | /DEF = Homo sapiens MUC3B mRNA for | |
| (DNA) and 152 | intestinal mucin, partial cds. /FEA = mRNA | |
| (amino acid) | /GEN = MUC3B /PROD = intestinal mucin | |
| | /DB_XREF = gi: 9929917 /UG = Hs.129782 | |
| | mucin 3A, intestinal | |
| myosin, heavy | gb: NM_003802.1 /DEF = Homo sapiens | 208208_at |
| polypeptide 13, | myosin, heavy polypeptide 13, skeletal | |
| skeletal muscle | muscle (MYH13), mRNA. /FEA = mRNA | |
| SEQ ID NOS: 38 | /GEN = MYH13 /PROD = myosin, heavy | |
| (DNA) and 153 | polypeptide 13, skeletal muscle | |
| (amino acid) | /DB_XREF = gi: 11321578 /UG = Hs.278488 | |
| | myosin, heavy polypeptide 13, skeletal | |
| | muscle /FL = gb: NM_003802.1 | |
| | gb: AF111782.2 | |
| myosin, light | gb: NM_002477.1 /DEF = Homo sapiens | 205145_s_at |
| polypeptide 5, | myosin, light polypeptide 5, regulatory | |
| regulatory | (MYL5), mRNA. /FEA = mRNA | |
| SEQ ID NOS: 39 | /GEN = MYL5 /PROD = myosin, light | |
| (DNA) and 154 | polypeptide 5, regulatory | |
| (amino acid) | /DB_XREF = gi: 4505304 /UG = Hs.170482 | |
| | myosin, light polypeptide 5, regulatory | |
| | /FL = gb: L03785.1 gb: NM_002477.1 | |
| nuclear receptor | gb: NM_000901.1 /DEF = Homo sapiens | 205259_at |
| subfamily 3, group C, | nuclear receptor subfamily 3, group C, | |
| member 2 | member 2 (NR3C2), mRNA. /FEA = mRNA | |
| SEQ ID NOS: 40 | /GEN = NR3C2 /PROD = nuclear receptor | |
| (DNA) and 155 | subfamily 3, group C, member 2 | |
| (amino acid) | /DB_XREF = gi: 4505198 /UG = Hs.1790 | |
| | nuclear receptor subfamily 3, group C, | |
| | member 2 /FL = gb: M16801.1 | |
| | gb: NM_000901.1 | |
| nuclear receptor | Consensus includes gb: AF228413.1 | 210174_at |
| subfamily 5, group A, | /DEF = Homo sapiens hepatocyte transcription | |
| member 2 | factor mRNA, 3UTR. /FEA = mRNA | |
| SEQ ID NOS: 41 | /DB_XREF = gi: 7677372 /UG = Hs.183123 | |
| (DNA) and 156 | nuclear receptor subfamily 5, group A, | |
| (amino acid) | member 2 /FL = gb: U93553.1 gb: AB019246.1 | |
| | gb: AF124247.1 | |
| pancreas-enriched | gb: NM_016341.1 /DEF = Homo sapiens | 205112_at |
| phospholipase C | pancreas-enriched phospholipase C | |
| SEQ ID NOS: 42 | (LOC51196), mRNA. /FEA = mRNA | |
| (DNA) and 157 | /GEN = LOC51196 /PROD = pancreas-enriched | |
| (amino acid) | phospholipase C /DB_XREF = gi: 7705940 | |
| | /UG = Hs.6733 pancreas-enriched | |
| | phospholipase C /FL = gb: AF190642.2 | |
| | gb: AF117948.1 gb: NM_016341.1 | |
| peroxisomal trans 2- | gb: NM_018441.1 /DEF = Homo sapiens | 221142_s_at |
| enoyl CoA reductase; | peroxisomal trans 2-enoyl CoA reductase; | |
| putative short chain | putative short chain alcohol dehydrogenase | |
| alcohol | (HSA250303), mRNA. /FEA = mRNA | |
| dehydrogenase | /GEN = HSA250303 /PROD = peroxisomal | |
| SEQ ID NOS: 43 | trans 2-enoyl CoA reductase; putative short | |
| (DNA) and 158 | chain alcohol dehydrogenase | |
| (amino acid) | /DB_XREF = gi: 8923751 /UG = Hs.281680 | |
| | peroxisomal trans 2-enoyl CoA reductase; | |
| | putative short chain alcohol dehydrogenase | |
| | /FL = gb: NM_018441.1 | |
| phosducin | gb: M33478.1 /DEF = Human 33-kDa | 211496_s_at |
| SEQ ID NOS: 44 | phototransducing protein mRNA, complete | |
| (DNA) and 159 | cds. /FEA = mRNA /DB_XREF = gi: 177186 | |
| (amino acid) | /UG = Hs.550 phosducin | |
| | /FL = gb: NM_022577.1 gb: M33478.1 | |
| | gb: AF076465.1 | |
| phosphatase and | gb: NM_000314.1 /DEF = Homo sapiens | 204054_at |
| tensin homolog | phosphatase and tensin homolog (mutated in | |
| (mutated in multiple | multiple advanced cancers 1) (PTEN), | |
| advanced cancers 1) | mRNA. /FEA = mRNA /GEN = PTEN | |
| SEQ ID NOS: 45 | /PROD = phosphatase and tensin homolog | |
| (DNA) and 160 | (mutated inmultiple advanced cancers 1) | |
| (amino acid) | /DB_XREF = gi: 4506248 /UG = Hs.10712 | |
| | phosphatase and tensin homolog (mutated in | |
| | multiple advanced cancers 1) | |
| | /FL = gb: U92436.1 gb: U93051.1 gb: U96180.1 | |
| | gb: NM_000314.1 | |
| potassium channel, | gb: U90065.1 /DEF = Human potassium | 204678_s_at |
| subfamily K, member | channel KCNO1 mRNA, complete cds. | |
| 1 (TWIK-1) | /FEA = mRNA /PROD = potassium channel | |
| SEQ ID NOS: 46 | KCNO1 /DB_XREF = gi: 1916294 | |
| (DNA) and 161 | /UG = Hs.79351 potassium channel, subfamily | |
| (amino acid) | K, member 1 (TWIK-1) /FL = gb: U33632.1 | |
| | gb: U90065.1 gb: U76996.1 gb: NM_002245.1 | |
| prostaglandin- | gb: NM_000963.1 /DEF = Homo sapiens | 204748_at |
| endoperoxide | prostaglandin-endoperoxide synthase 2 | |
| synthase 2 | (prostaglandin GH synthase and | |
| (prostaglandin G/H | cyclooxygenase) (PTGS2), mRNA. | |
| synthase and | /FEA = mRNA /GEN = PTGS2 | |
| cyclooxygenase) | /PROD = prostaglandin-endoperoxide synthase | |
| SEQ ID NOS: 47 | 2(prostaglandin GH synthase and | |
| (DNA) and 162 | cyclooxygenase) /DB_XREF = gi: 4506264 | |
| (amino acid) | /UG = Hs.196384 prostaglandin-endoperoxide | |
| | synthase 2 (prostaglandin GH synthase and | |
| | cyclooxygenase) /FL = gb: M90100.1 | |
| | gb: L15326.1 gb: NM_000963.1 | |
| protease inhibitor 3, | gb: NM_002638.1 /DEF = Homo sapiens | 203691_at |
| skin-derived | protease inhibitor 3, skin-derived (SKALP) | |
| (SKALP) | (PI3), mRNA. /FEA = mRNA /GEN = PI3 | |
| SEQ ID NOS: 48 | /PROD = protease inhibitor 3, skin-derived | |
| (DNA) and 163 | (SKALP) /DB_XREF = gi: 4505786 | |
| (amino acid) | /UG = Hs.112341 protease inhibitor 3, skin- | |
| | derived (SKALP) /FL = gb: NM_002638.1 | |
| PTPRF interacting | Consensus includes gb: AI692180 /FEA = EST | 212841_s_at |
| protein, binding | /DB_XREF = gi: 4969520 | |
| protein 2 (liprin beta | /DB_XREF = est: wd37f06.x1 | |
| 2) | /CLONE = IMAGE: 2330339 /UG = Hs.12953 | |
| SEQ ID NO: 49 | PTPRF interacting protein, binding protein 2 | |
| (DNA) | (liprin beta 2) | |
| retinoic acid receptor | Consensus includes gb: AI669229 /FEA = EST | 221872_at |
| responder (tazarotene | /DB_XREF = gi: 4834003 | |
| induced) 1 | /DB_XREF = est: wc13e06.x1 | |
| SEQ ID NO: 50 | /CLONE = IMAGE: 2315074 /UG = Hs.82547 | |
| (DNA) | retinoic acid receptor responder (tazarotene | |
| | induced) 1 | |
| Rho GTPase | gb: NM_015366.1 /DEF = Homo sapiens Rho | 205980_s_at |
| activating protein 8 | GTPase activating protein 8 (ARHGAP8), | |
| SEQ ID NOS: 51 | mRNA. /FEA = mRNA /GEN = ARHGAP8 | |
| (DNA) and 164 | /PROD = Rho GTPase activating protein 8 | |
| (amino acid) | /DB_XREF = gi: 7656903 /UG = Hs.102336 | |
| | Rho GTPase activating protein 8 | |
| | /FL = gb: NM_015366.1 | |
| ribonuclease, RNase | gb: NM_002933.1 /DEF = Homo sapiens | 201785_at |
| A family, 1 | ribonuclease, RNase A family, 1 (pancreatic) | |
| (pancreatic) | (RNASE1), mRNA. /FEA = mRNA | |
| SEQ ID NOS: 52 | /GEN = RNASE1 /PROD = ribonuclease, | |
| (DNA) and 165 | RNase A family, 1 (pancreatic) | |
| (amino acid) | /DB_XREF = gi: 4506546 /UG = Hs.78224 | |
| | ribonuclease, RNase A family, 1 (pancreatic) | |
| | /FL = gb: BC005324.1 gb: NM_002933.1 | |
| | gb: D26129.1 | |
| serine (or cysteine) | gb: NM_002639.1 /DEF = Homo sapiens serine | 204855_at |
| proteinase inhibitor, | (or cysteine) proteinase inhibitor, clade B | |
| clade B (ovalbumin), | (ovalbumin), member 5 (SERPINB5), | |
| member 5 | mRNA. /FEA = mRNA /GEN = SERPINB5 | |
| SEQ ID NOS: 53 | /PROD = serine (or cysteine) proteinase | |
| (DNA) and 166 | inhibitor, cladeB (ovalbumin), member 5 | |
| (amino acid) | /DB_XREF = gi: 4505788 /UG = Hs.55279 | |
| | serine (or cysteine) proteinase inhibitor, clade | |
| | B (ovalbumin), member 5 | |
| | /FL = gb: NM_002639.1 gb: U04313.1 | |
| spondin 1, (f-spondin) | Consensus includes gb: AI885290 /FEA = EST | 213994_s_at |
| extracellular matrix | /DB_XREF = gi: 5590454 | |
| protein | /DB_XREF = est: wl92a04.x1 | |
| SEQ ID NO: 54 | /CLONE = IMAGE: 2432334 /UG = Hs.5378 | |
| (DNA) | spondin 1, (f-spondin) extracellular matrix | |
| | protein | |
| superoxide dismutase | gb: NM_003102.1 /DEF = Homo sapiens | 205236_x_at |
| 3, extracellular | superoxide dismutase 3, extracellular (SOD3), | |
| SEQ ID NOS: 55 | mRNA. /FEA = mRNA /GEN = SOD3 | |
| (DNA) and 167 | /PROD = superoxide dismutase 3, extracellular | |
| (amino acid) | /DB_XREF = gi: 4507150 /UG = Hs.2420 | |
| | superoxide dismutase 3, extracellular | |
| | /FL = gb: J02947.1 gb: NM_003102.1 | |
| tumor necrosis factor | gb: BC002794.1 /DEF = Homo sapiens, tumor | 209354_at |
| receptor superfamily, | necrosis factor receptor superfamily, member | |
| member 14 | 14 (herpesvirus entry mediator), clone | |
| (herpesvirus entry | MGC: 3753, mRNA, complete cds. | |
| mediator) | /FEA: = mRNA /PROD = tumor necrosis factor | |
| SEQ ID NOS: 56 | receptor superfamily, member 14 (herpesvirus | |
| (DNA) and 168 | entry mediator) /DB_XREF = gi: 12803894 | |
| (amino acid) | /UG = Hs.279899 tumor necrosis factor | |
| | receptor superfamily, member 14 (herpesvirus | |
| | entry mediator) /FL = gb: BC002794.1 | |
| | gb: U70321.1 gb: U81232.1 gb: NM_003820.1 | |
| | gb: AF153978.1 | |
| tumor necrosis factor | gb: NM_000043.1 /DEF = Homo sapiens tumor | 204781_s_at |
| receptor superfamily, | necrosis factor receptor superfamily, member | |
| member 6 | 6 (TNFRSF6), mRNA. /FEA = mRNA | |
| SEQ ID NOS: 57 | /GEN = TNFRSF6 /PROD = apoptosis (APO-1) | |
| (DNA) and 169 | antigen 1 /DB_XREF = gi: 4507582 | |
| (amino acid) | /UG = Hs.82359 tumor necrosis factor receptor | |
| | superfamily, member 6 /FL = gb: M67454.1 | |
| | gb: NM_000043.1 | |
| zinc finger protein | gb: NM_003438.1 /DEF = Homo sapiens zinc | 207394_at |
| 137 (clone pHZ-30) | finger protein 137 (clone pHZ-30) (ZNF137), | |
| SEQ ID NOS: 58 | mRNA. /FEA = mRNA /GEN = ZNF137 | |
| (DNA) and 170 | /PROD = zinc finger protein 137 (clone pHZ- | |
| (amino acid) | 30) /DB_XREF = gi: 4507988 /UG = Hs.151689 | |
| | zinc finger protein 137 (clone pHZ-30) | |
| | /FL = gb: NM_003438.1 gb: U09414.1 | |
| hypothetical protein | Consensus includes gb: AI339568 /FEA = EST | 222727_s_at |
| FLJ22233 | /DB_XREF = gi: 4076495 | |
| SEQ ID NO: 59 | /DB_XREF = est: qk67e10.x1 | |
| (DNA) | /CLONE = IMAGE: 1874058 /UG = Hs.286194 | |
| | hypothetical protein FLJ22233 | |
| | /FL = gb: NM_024959.1 | |
| regenerating gene | gb: AY007243.1 /DEF = Homo sapiens | 223447_at |
| type IV | regenerating gene type IV mRNA, complete | |
| SEQ ID NOS: 60 | cds. /FEA = mRNA /PROD = regenerating gene | |
| (DNA) and 171 | type IV /DB_XREF = gi: 12621025 | |
| (amino acid) | /UG = Hs.105484 Homo sapiens regenerating | |
| | gene type IV mRNA, complete cds | |
| | /FL = gb: AY007243.1 | |
| Homo sapiens cDNA: | Consensus includes gb: AK025615.1 | 225285_at |
| FLJ21962 fis, clone | /DEF = Homo sapiens cDNA: FLJ21962 fis, | |
| HEP05564 | clone HEP05564. /FEA = mRNA | |
| SEQ ID NO: 61 | /DB_XREF = gi: 10438186 /UG = Hs.7567 | |
| (DNA) | Homo sapiens cDNA: FLJ21962 fis, clone | |
| | HEP05564 | |
| ESTs | Consensus includes gb: N37023 /FEA = EST | 225407_at |
| SEQ ID NO: 62 | /DB_XREF = gi: 1158165 | |
| (DNA) | /DB_XREF = est: yy40d03.s1 | |
| | /CLONE = IMAGE: 273701 /UG = Hs.235883 | |
| | ESTs | |
| phosphoprotein | Consensus includes gb: AK000680.1 | 225626_at |
| associated with | /DEF = Homo sapiens cDNA FLJ20673 fis, | |
| glycosphingolipid- | clone KAIA4464. /FEA = mRNA | |
| enriched | /DB_XREF = gi: 7020924 /UG = Hs.266175 | |
| microdomains | phosphoprotein associated with GEMs | |
| SEQ ID NOS: 63 | /FL = gb: AF240634.1 gb: NM_018440.1 | |
| (DNA) and 172 | | |
| (amino acid) | | |
| prostate cancer | Consensus includes gb: AA633076 /FEA = EST | 226167_at |
| associated protein 7 | /DB_XREF = gi: 2556490 | |
| SEQ ID NO: 64 | /DB_XREF = est: nq38a06.s1 | |
| (DNA) | /CLONE = IMAGE: 1146130 /UG = Hs.27495 | |
| | prostate cancer associated protein 7 | |
| Homo sapiens, | Consensus includes gb: AA524690 /FEA = EST | 226168_at |
| Similar to RIKEN | /DB_XREF = gi: 2265618 | |
| cDNA 1110060O18 | /DB_XREF = est: ng38e07.s1 | |
| gene, clone | /CLONE = IMAGE: 937092 /UG = Hs.294143 | |
| MGC: 17236 | ESTs, Weakly similar to predicted using | |
| IMAGE: 3864137, | Genefinder C. elegans | |
| mRNA, complete cds | | |
| SEQ ID NO: 65 | | |
| (DNA) | | |
| hypothetical protein | Consensus includes gb: BF111925 /FEA = EST | 226171_at |
| FLJ20209 | /DB_XREF = gi: 10941704 | |
| SEQ ID NO: 66 | /DB_XREF = est: 7138g05.x1 | |
| (DNA) | /CLONE = IMAGE: 3523784 /UG = Hs.3685 | |
| | hypothetical protein FLJ20209 | |
| Homo sapiens mRNA | Consensus includes gb: AA532640 /FEA = EST | 226484_at |
| for KIAA1190 | /DB_XREF = gi: 2276894 | |
| protein, partial cds | /DB_XREF = est: nj17c04.s1 | |
| SEQ ID NOS: 67 | /CLONE = IMAGE: 986598 /UG = Hs.206259 | |
| (DNA) and 173 | Homo sapiens mRNA for KIAA1190 protein, | |
| (amino acid) | partial cds | |
| KIAA1543 protein | Consensus includes gb: AB040976.1 | 226494_at |
| SEQ ID NOS: 68 | /DEF = Homo sapiens mRNA for KIAA1543 | |
| (DNA) and 174 | protein, partial cds. /FEA = mRNA | |
| (amino acid) | /GEN = KIAA1543 /PROD = KIAA1543 | |
| | protein /DB_XREF = gi: 7959352 | |
| | /UG: Hs.17686 KIAA1543 protein | |
| hypothetical protein | Consensus includes gb: AK002203.1 | 226992_at |
| MGC20702 | /DEF = Homo sapiens cDNA FLJ11341 fis, | |
| SEQ ID NO: 69 | clone PLACE1010786. /FEA = mRNA | |
| (DNA) | /DB_XREF = gi: 7023932 /UG = Hs.10260 | |
| | Homo sapiens cDNA FLJ11341 fis, clone | |
| | PLACE1010786 | |
| Homo sapiens cDNA | Consensus includes gb: AA129774 /FEA = EST | 227019_at |
| FLJ13137 fis, clone | /DB_XREF = gi: 1690185 | |
| NT2RP3003150 | /DB_XREF = est: zl16h09.s1 | |
| SEQ ID NO: 70 | /CLONE = IMAGE: 502145 /UG = Hs.288905 | |
| (DNA) | Homo sapiens cDNA FLJ13137 fis, clone | |
| | NT2RP3003150 | |
| hypothetical protein | Consensus includes gb: AW138767 | 227180_at |
| FLJ23563 | /FEA = EST /DB_XREF = gi: 6143085 | |
| SEQ ID NO: 71 | /DB_XREF = est: UI-H-BI1-aep-a-12-0-UI.s1 | |
| (DNA) | /CLONE = IMAGE: 2719799 /UG = Hs.274256 | |
| | hypothetical protein FLJ23563 | |
| ESTs | Consensus includes gb: AW264333 | 227320_at |
| SEQ ID NO: 72 | /FEA = EST /DB_XREF = gi: 6641075 | |
| (DNA) | /DB_XREF = est: xq98e01.x1 | |
| | /CLONE = IMAGE: 2758680 /UG = Hs.21835 | |
| | ESTs | |
| ESTs | Consensus includes gb: BF589359 /FEA = EST | 227354_at |
| SEQ ID NO: 73 | /DB_XREF = gi: 11681683 | |
| (DNA) | /DB_XREF = est: nab25d01.x1 | |
| | /CLONE = IMAGE: 3266737 /UG = Hs.13256 | |
| | ESTs | |
| Homo sapiens, | Consensus includes gb: AW001287 | 227676_at |
| Similar to RIKEN | /FEA = EST /DB_XREF = gi: 5848203 | |
| cDNA 1810037C20 | /DB_XREF = est: wu27e06.x1 | |
| gene, clone | /CLONE = IMAGE: 2521282 /UG = Hs.61265 | |
| MGC: 21481 | ESTs, Weakly similar to G786_HUMAN | |
| IMAGE: 3852062, | PROTEIN GS3786 H. sapiens | |
| mRNA, complete cds | | |
| SEQ ID NO: 74 | | |
| (DNA) | | |
| ESTs, Weakly similar | Consensus includes gb: AA557324 /FEA = EST | 227702_at |
| to JX0331 laurate | /DB_XREF = gi: 2327801 | |
| omega-hydroxylase | /DB_XREF = est: nl81a02.s1 | |
| [H. sapiens] | /CLONE = IMAGE: 1057034 /UG = Hs.26040 | |
| SEQ ID NO: 75 | ESTs, Weakly similar to fatty acid omega- | |
| (DNA) | hydroxylase H. sapiens | |
| Homo sapiens cDNA: | Consensus includes gb: T86159 /FEA = EST | 227724_at |
| FLJ22063 fis, clone | /DB_XREF = gi: 714511 | |
| HEP10326 | /DB_XREF = est: yd84h07.s1 | |
| SEQ ID NO: 76 | /CLONE = IMAGE: 114973 /UG = Hs.10450 | |
| (DNA) | Homo sapiens cDNA: FLJ22063 fis, clone | |
| | HEP10326 | |
| GalNAc alpha-2,6- | Consensus includes gb: Y11339.2 | 227725_at |
| sialyltransferase I, | /DEF = Homo sapiens mRNA for GalNAc | |
| long form | alpha-2,6-sialyltransferase I, long form. | |
| SEQ ID NOS: 77 | /FEA = mRNA /PROD = GalNAc alpha-2,6- | |
| (DNA) and 175 | sialyltransferase I /DB_XREF = gi: 7576275 | |
| (amino acid) | /UG = Hs.105352 GalNAc alpha-2,6- | |
| | sialyltransferase I, long form | |
| ESTs, Weakly similar | Consensus includes gb: AI827789 /FEA = EST | 228241_at |
| to JE0350 Anterior | /DB_XREF = gi: 5448449 | |
| gradient-2 | /DB_XREF = est: wf33a07.x1 | |
| [H. sapiens] | /CLONE = IMAGE: 2357364 /UG = Hs.100686 | |
| SEQ ID NO: 78 | ESTs, Weakly similar to JE0350 Anterior | |
| (DNA) | gradient-2 H. sapiens | |
| ESTs | Consensus includes gb: AI700341 /FEA = EST | 228653_at |
| SEQ ID NO: 79 | /DB_XREF = gi: 4988241 | |
| (DNA) | /DB_XREF = est: wd06e10.x1 | |
| | /CLONE = IMAGE: 2327370 /UG = Hs.110406 | |
| | ESTs | |
| ESTs | Consensus includes gb: BG494007 /FEA = EST | 228716_at |
| SEQ ID NO: 80 | /DB_XREF = gi: 13455521 | |
| (DNA) | /DB_XREF = est: 602542289F1 | |
| | /CLONE = IMAGE: 4673182 /UG = Hs.203213 | |
| | ESTs | |
| anterior gradient 2 | Consensus includes gb: AI922323 /FEA = EST | 228969_at |
| (Xenepus laevis) | /DB_XREF = gi: 5658287 | |
| homolog | /DB_XREF = est: wn90h03.x1 | |
| SEQ ID NO: 81 | /CLONE = IMAGE: 2453141 /UG = Hs.293380 | |
| (DNA) | ESTs | |
| Homo sapiens cDNA: | Consensus includes gb: AK026984.1 | 229021_at |
| FLJ23331 fis, clone | /DEF = Homo sapiens cDNA: FLJ23331 fis, | |
| HEP12664 | clone HEP12664 /FEA = mRNA | |
| SEQ ID NO: 82 | /DB_XREF = gi: 10439980 /UG = Hs.50742 | |
| (DNA) | Homo sapiens cDNA: FLJ23331 fis, clone | |
| | HEP12664 | |
| ESTs | Consensus includes gb: AI559300 /FEA = EST | 229331_at |
| SEQ ID NO: 83 | /DB_XREF = gi: 4509505 | |
| (DNA) | /DB_XREF = est: tq43d03.x1 | |
| | /CLONE = IMAGE: 2211557 /UG = Hs.294140 | |
| | ESTs | |
| hypothetical protein | Consensus includes gb: AI830823 /FEA = EST | 229439_s_at |
| SEQ ID NO: 84 | /DB_XREF = gi: 5451416 | |
| (DNA) | /DB_XREF = est: wj52b06.x1 | |
| | /CLONE = IMAGE: 2406419 /UG = Hs.95549 | |
| | hypothetical protein | |
| ESTs | Consensus includes gb: BF431989 /FEA = EST | 229657_at |
| SEQ ID NO: 85 | /DB_XREF = gi: 11444103 | |
| (DNA) | /DB_XREF = est: nab84a05.x1 | |
| | /CLONE = IMAGE: 3274280 /UG = Hs.203213 | |
| | ESTs | |
| ESTs | Consensus includes gb: BF589413 /FEA = EST | 229893_at |
| SEQ ID NO: 86 | /DB_XREF = gi: 11681737 | |
| (DNA) | /DB_XREF = est: nab26b11.x1 | |
| | /CLONE = IMAGE: 3267020 /UG = Hs.55501 | |
| | ESTs | |
| brain-specific protein | Consensus includes gb: BG055052 /FEA = EST | 230104_s_at |
| p25 alpha | /DB_XREF = gi: 12512386 | |
| SEQ ID NO: 87 | /DB_XREF = est: nac94g06.x1 | |
| (DNA) | /CLONE = IMAGE: 3441995 /UG = Hs.29353 | |
| | brain-specific protein p25 alpha | |
| ESTs, Weakly similar | Consensus includes gb: BF110588 /FEA = EST | 230645_at |
| to MMHUE4 | /DB_XREF = gi: 10940278 | |
| erythrocyte | /DB_XREF = est: 7n39e12.x1 | |
| membrane protein | /CLONE = IMAGE: 3567071 /UG = Hs.150478 | |
| 4.1, parent splice | ESTs, Weakly similar to KIAA0987 protein | |
| form [H. sapiens] | H. sapiens | |
| SEQ ID NO: 88 | | |
| (DNA) | | |
| ESTs | Consensus includes gb: BF592062 /FEA = EST | 230760_at |
| SEQ ID NO: 89 | /DB_XREF = gi: 11684386 | |
| (DNA) | /DB_XREF = est: 7n98h06.x1 | |
| | /CLONE = IMAGE: 3572962 /UG = Hs.233890 | |
| | ESTs | |
| hepatocyte nuclear | Consensus includes gb: AI032108 /FEA = EST | 230914_at |
| factor 4, alpha | /DB_XREF = gi: 3250320 | |
| SEQ ID NO: 90 | /DB_XREF = est: ow92d11.x1 | |
| (DNA) | /CLONE = IMAGE: 1654293 /UG = Hs.54424 | |
| | hepatocyte nuclear factor 4, alpha | |
| ESTs | Consensus includes gb: AW203959 | 230944_at |
| SEQ ID NO: 91 | /FEA = EST /DB_XREF = gi: 6503431 | |
| (DNA) | /DB_XREF = est: UI-H-BI1-aeu-b-12-0-UI.s1 | |
| | /CLONE = IMAGE: 2720590 /UG = Hs.149532 | |
| | ESTs | |
| ESTs | Consensus includes gb: AI139990 /FEA = EST | 231022_at |
| SEQ ID NO: 92 | /DB_XREF = gi: 3647447 | |
| (DNA) | /DB_XREF = est: qa47d03.x1 | |
| | /CLONE = IMAGE: 1689893 /UG = Hs.134586 | |
| | ESTs | |
| ESTs | Consensus includes gb: AI806131 /FEA = EST | 231148_at |
| SEQ ID NO: 93 | /DB_XREF = gi: 5392697 | |
| (DNA) | /DB_XREF = est: wf06c06.x1 | |
| | /CLONE = IMAGE: 2349802 /UG = Hs.99376 | |
| | ESTs | |
| hypothetical protein | Consensus includes gb: AB046810.1 | 232083_at |
| FLJ23045 | /DEF = Homo sapiens mRNA for KIAA1590 | |
| SEQ ID NO: 94 | protein, partial cds. /FEA = mRNA | |
| (DNA) | /GEN = KIAA1590 /PROD = KIAA1590 | |
| | protein /DB_XREF = gi: 10047254 | |
| | /UG = Hs.101774 hypothetical protein | |
| | FLJ23045 | |
| Homo sapiens cDNA: | Consensus includes gb: AK026404.1 | 232321_at |
| FLJ22751 fis, clone | /DEF = Homo sapiens cDNA: FLJ22751 fis, | |
| KAIA0483, highly | clone KAIA0483, highly similar to AF016692 | |
| similar to AF016692 | Homo sapiens small intestinal mucin (MUC3) | |
| Homo sapiens small | mRNA. /FEA = mRNA | |
| intestinal mucin | /DB_XREF = gi: 10439257 /UG = Hs.271819 | |
| (MUC3) mRNA | Homo sapiens cDNA: FLJ22751 fis, clone | |
| SEQ ID NO: 95 | KAIA0483, highly similar to AF016692 | |
| (DNA) | Homo sapiens small intestinal mucin (MUC3) | |
| | mRNA | |
| Homo sapiens PAC | Consensus includes gb: AC004908 | 232641_at |
| clone RP5-855D21 | /DEF = Homo sapiens PAC clone RP5- | |
| SEQ ID NOS: 96 | 855D21 /FEA = CDS_3 | |
| (DNA), 176 (amino | /DB_XREF = gi: 4156179 /UG = Hs.249181 | |
| acid), 177 (amino | Homo sapiens PAC clone RP5-855D21 | |
| acid), and 178 (amino | | |
| acid) | | |
| putative microtubule- | Consensus includes gb: AJ251708.1 | 234669_x_at |
| binding protein | /DEF = Homo sapiens partial mRNA for | |
| SEQ ID NO: 97 | putative microtubule-binding protein. | |
| (DNA) | /FEA = mRNA /PROD = putative microtubule- | |
| | binding protein /DB_XREF = gi: 6491740 | |
| | /UG = Hs.326544 putative microtubule-binding | |
| | protein | |
| ESTs | Consensus includes gb: AI741469 /FEA = EST | 234970_at |
| SEQ ID NO: 98 | /DB_XREF = gi: 5109757 | |
| (DNA) | /DB_XREF = est: wg11b01.x1 | |
| | /CLONE = IMAGE: 2364745 /UG = Hs.57787 | |
| | ESTs | |
| ESTs | Consensus includes gb: AI417897 /FEA = EST | 235444_at |
| SEQ ID NO: 99 | /DB_XREF = gi: 4261401 | |
| (DNA) | /DB_XREF = est: tg55b06.x1 | |
| | /CLONE = IMAGE: 2112659 /UG = Hs.235860 | |
| | ESTs | |
| ESTs | Consensus includes gb: AA827649 /FEA = EST | 235515_at |
| SEQ ID NO: 100 | /DB_XREF = gi: 2900090 | |
| (DNA) | /DB_XREF = est: od01a12.s1 | |
| | /CLONE = IMAGE: 1357918 /UG = Hs.105317 | |
| | ESTs | |
| ESTs | Consensus includes gb: AI493909 /FEA = EST | 235562_at |
| SEQ ID NO: 101 | /DB_XREF = gi: 4394912 | |
| (DNA) | /DB_XREF = est: qz94e02.x1 | |
| | /CLONE = IMAGE: 2042234 /UG = Hs.6131 | |
| | ESTs | |
| ESTs | Consensus includes gb: AV741130 /FEA = EST | 235651_at |
| SEQ ID NO: 102 | /DB_XREF = gi: 10858711 | |
| (DNA) | /DB_XREF = est: AV741130 | |
| | /CLONE = CBCATB06 /UG = Hs.173704 | |
| | ESTs, Moderately similar to ALU8_HUMAN | |
| | ALU SUBFAMILY SX SEQUENCE | |
| | CONTAMINATION WARNING ENTRY | |
| | H. sapiens | |
| ESTs, Weakly similar | Consensus includes gb: AI864053 /FEA = EST | 235678_at |
| to I38588 reverse | /DB_XREF = gi: 5528160 | |
| transcriptase homolog | /DB_XREF = est: wj55h10.x1 | |
| [H. sapiens] | /CLONE = IMAGE: 2406787 /UG = Hs.39972 | |
| SEQ ID NO: 103 | ESTs, Weakly similar to I38588 reverse | |
| (DNA) | transcriptase homolog H. sapiens | |
| ESTs | Consensus includes gb: AW339510 | 235866_at |
| SEQ ID NO: 104 | /FEA = EST /DB_XREF = gi: 6836136 | |
| (DNA) | /DB_XREF = est: xz91h08.x1 | |
| | /CLONE = IMAGE: 2871615 /UG = Hs.42722 | |
| | ESTs | |
| ESTs | Consensus includes gb: AI076192 /FEA = EST | 236422_at |
| SEQ ID NO: 105 | /DB_XREF = gi: 3405370 | |
| (DNA) | /DB_XREF = est: oz01g07.x1 | |
| | /CLONE = IMAGE: 1674108 /UG = Hs.131933 | |
| | ESTs | |
| ESTs | Consensus includes gb: AL044570 /FEA = EST | 236548_at |
| SEQ ID NO: 106 | /DB_XREF = gi: 5432785 | |
| (DNA) | /DB_XREF = est: DKFZp434L082_s1 | |
| | /CLONE = DKFZp434L082 /UG = Hs.147975 | |
| | ESTs | |
| ESTs | Consensus includes gb: AI968097 /FEA = EST | 237835_at |
| SEQ ID NO: 107 | /DB_XREF = gi: 5764915 | |
| (DNA) | /DB_XREF = est: wu13a12.x1 | |
| | /CLONE = IMAGE: 2516830 /UG = Hs.131360 | |
| | ESTs | |
| ESTs | Consensus includes gb: AI733801 /FEA = EST | 237923_at |
| SEQ ID NO: 108 | /DB_XREF = gi: 5054914 | |
| (DNA) | /DB_XREF = est: qk39c04.x5 | |
| | /CLONE = IMAGE: 1871334 /UG = Hs.146186 | |
| | ESTs | |
| ESTs | Consensus includes gb: BF594323 /FEA = EST | 238103_at |
| SEQ ID NO: 109 | /DB_XREF = gi: 11686647 | |
| (DNA) | /DB_XREF = est: 7h79g07.x1 | |
| | /CLONE = IMAGE: 3322236 /UG = Hs.158989 | |
| | ESTs | |
| Homo sapiens, clone | Consensus includes gb: T69015 /FEA = EST | 238422_at |
| MGC: 16402 | /DB_XREF = gi: 680163 | |
| IMAGE: 3940360, | /DB_XREF = est: yc31f04.s1 | |
| mRNA, complete cds | /CLONE = IMAGE: 82303 /UG = Hs.192728 | |
| SEQ ID NO: 110 | ESTs | |
| (DNA) | | |
| ESTs | Consensus includes gb: AA502384 /FEA = EST | 238956_at |
| SEQ ID NO: 111 | /DB_XREF = gi: 2237351 | |
| (DNA) | /DB_XREF = est: ne27f11.s1 | |
| | /CLONE = IMAGE: 898605 /UG = Hs.151529 | |
| | ESTs | |
| ESTs | Consensus includes gb: AI739241 /FEA = EST | 238984_at |
| SEQ ID NO: 112 | /DB_XREF = gi: 5101222 | |
| (DNA) | /DB_XREF = est: wi14h02.x1 | |
| | /CLONE = IMAGE: 2390259 /UG = Hs.171480 | |
| | ESTs | |
| ESTs | Consensus includes gb: AA088446 /FEA = EST | 239065_at |
| SEQ ID NO: 113 | /DB_XREF = gi: 1633958 | |
| (DNA) | /DB_XREF = est: zl89f04.s1 | |
| | /CLONE = IMAGE: 511807 /UG = Hs.170298 | |
| | ESTs | |
| ESTs | Consensus includes gb: AI493046 /FEA = EST | 239148_at |
| SEQ ID NO: 114 | /DB_XREF = gi: 4394049 | |
| (DNA) | /DB_XREF = est: qz49b04.x1 | |
| | /CLONE = IMAGE: 2030191 /UG = Hs.146133 | |
| | ESTs | |
| ESTs | Consensus includes gb: AI243098 /FEA = EST | 239966_at |
| SEQ ID NO: 115 | /DB_XREF = gi: 3838495 | |
| (DNA) | /DB_XREF = est: qh26e03.x1 | |
| | /CLONE = IMAGE: 1845820 /UG = Hs.178398 | |
| | ESTs | |
| ESTs, Weakly similar | Consensus includes gb: AI633523 /FEA = EST | 240106_at |
| to A49175 Motch B | /DB_XREF = gi: 4684853 | |
| protein - mouse | /DB_XREF = est: th68b11.x1 | |
| [M. musculus] | /CLONE = IMAGE: 2123805 /UG = Hs.44705 | |
| SEQ ID NO: 116 | ESTs | |
| (DNA) | | |
| ESTs | Consensus includes gb: AI300126 /FEA = EST | 240830_at |
| SEQ ID NO: 117 | /DB_XREF = gi: 3959472 | |
| (DNA) | /DB_XREF = est: qn54f02.x1 | |
| | /CLONE = IMAGE: 1902075 /UG = Hs.257858 | |
| | ESTs | |
| ESTs | Consensus includes gb: AI917390 /FEA = EST | 240964_at |
| SEQ ID NO: 118 | /DB_XREF = gi: 5637245 | |
| (DNA) | /DB_XREF = est: ts79a05.x1 | |
| | /CLONE = IMAGE: 2237456 /UG = Hs.99415 | |
| | ESTs | |
| betacellulin | Consensus includes gb: AI620677 /FEA = EST | 241412_at |
| SEQ ID NO: 119 | /DB_XREF = gi: 4629803 | |
| (DNA) | /DB_XREF = est: tu85e09.x1 | |
| | /CLONE = IMAGE: 2257864 /UG = Hs.154191 | |
| | ESTs | |
| ESTs | Consensus includes gb: H05025 /FEA = EST | 241874_at |
| SEQ ID NO: 120 | /DB_XREF = gi: 868577 | |
| (DNA) | /DB_XREF = est: yl74g12.s1 | |
| | /CLONE = IMAGE: 43864 /UG = Hs.323767 | |
| | ESTs | |
| ESTs | Consensus includes gb: AW024656 | 242358_at |
| SEQ ID NO: 121 | /FEA = EST /DB_XREF = gi: 5878186 | |
| (DNA) | /DB_XREF = est: wu78h05.x1 | |
| | /CLONE = IMAGE: 2526201 /UG = Hs.233382 | |
| | ESTs, Moderately similar to AF119917 62 | |
| | PRO2822 H. sapiens | |
| ESTs | Consensus includes gb: BF696216 /FEA = EST | 242626_at |
| SEQ ID NO: 122 | /DB_XREF = gi: 11981624 | |
| (DNA) | /DB_XREF = est: 602124536F1 | |
| | /CLONE = IMAGE: 4281632 /UG = Hs.188724 | |
| | ESTs | |
| ESTs | Consensus includes gb: N57929 /FEA = EST | 242978_x_at |
| SEQ ID NO: 123 | /DB_XREF = gi: 1201819 | |
| (DNA) | /DB_XREF = est: yv61e06.s1 | |
| | /CLONE = IMAGE: 247234 /UG = Hs.48100 | |
| | ESTs | |
| ESTs, Weakly similar | Consensus includes gb: AI457984 /FEA = EST | 243729_at |
| to ALU1_HUMAN | /DB_XREF = gi: 4312002 | |
| ALU SUBFAMILY J | /DB_XREF = est: tj66a04.x1 | |
| SEQUENCE | /CLONE = IMAGE: 2146446 /UG = Hs.165900 | |
| CONTAMINATION | ESTs, Weakly similar to ALUC_HUMAN | |
| WARNING ENTRY | !!!! ALU CLASS C WARNING ENTRY !!! | |
| [H. sapiens] | H. sapiens | |
| SEQ ID NO: 124 | | |
| (DNA) | | |
| ESTs | Consensus includes gb: AA581439 /FEA = EST | 244650_at |
| SEQ ID NO: 125 | /DB_XREF = gi: 2359211 | |
| (DNA) | /DB_XREF = est: nh13c10.s1 | |
| | /CLONE = IMAGE: 952242 /UG = Hs.152328 | |
| | ESTs | |

Biological Validation of Biomarker Candidates: Modulation of Expression by Treatment with Ligands for EGFR or by Treatment with Inhibitors for EGFR

[0094] To validate the significance of the biomarker candidates to predict the activity of the EGFR pathway and thereby the sensitivity of cancer cell to inhibition of EGFR by therapy, genes that would be regulated by the EGFR pathway were identified. Demonstration of that property for the EGFR biomarker candidates described above would add additional credibility as it would link these genes functionally to the EGFR pathway. Colon cancer and a lung cancer cell lines were treated with epidermal growth factor, in the absence of serum or, in the presence of serum with the EGFR modulator BMS-461453 or the EGFR modulator cetuximab (also known as C225, a chimeric monoclonal EGFR antibody). To identify genes induced by epidermal growth factor, serum starved cells were treated with 20 ng/ml EGF for 0.5, 6, and 18 hours. Control cells were treated with media alone. The expression profiling was performed, and data was analyzed using GeneChip® Expression Analysis software MAS 5.0 (Affymetrix, Santa Clara, Calif.).

[0095] Genes inhibited by EGFR antagonists were identified by treating cells in the presence of 10% serum with 0.5 uM of BMS-461453 or 1 ug/ml or 5 ug/ml of C225 for 6 and 24 hours. Cells exposed to 0.05% DMSO were used as the experimental control. Expression profiling was performed, and data were analyzed using GeneChip® Expression Analysis software MAS 5.0.

[0096] The gene expression of the inhibitor or EGFR treated cell lines was compared pair-wise to the untreated controls. Polynucleotides from the biomarker list, in which expression was increased two fold with EGFR exposure or decreased two fold with EGFR inhibitor treatment compared to the untreated controls, were considered to be modulated by EGFR. These biomarkers are provided in Table 4. Examples of the biomarkers include EphA1, B-cell translocation gene 2, prostaglandin-endoperoxide synthase 2 and serine (or cysteine) proteinase inhibitor (clade B), which are highly expressed in sensitive cells and up regulated by treatment with EGFR. On the other hand, spondin 1, talin 2 and nuclear receptor subfamily 3 are genes whose expression levels correlate with sensitivity or resistance of colon cancer cell lines and are consistently down regulated by treatment with EGFR inhibitors BMS-461453 and C225. It appears that these biomarkers are likely to be directly or indirectly involved in the EGFR signaling pathway, based on their expression modulation by EGF or EGFR inhibitor treatment

Identification of Top Biomarkers

[0097] In an attempt to further prioritize biomarkers for use in predicting response of cancer cells to treatment with one or more EGFR modulators, the following filter criteria were used on the Table 4 biomarkers to identity a total of fourteen biomarkers (Table 5) as the top biomarkers:

[0098] (1) results from the highly significant correlation of gene expression with IC₅₀: A p-value<0.01 in the student TTEST or a Pearson value<−0.6 described above;

[0099] (2) results from the modulation of expression by EGFR ligand and/or EGFR inhibitor treatment described above; and

[0100] (3) biomarkers supported by literature revealing a direct relationship between the EGFR pathway and the biomarkers.

TABLE 5
Top Fourteen Biomarkers

| | Literature Support | Induced by EGF/ |
|---|---|---|
| Biomarker Name | Citation | Inhibited by EGFR antagonist |
| mucin 2, | J Biol Chem. 2002 Aug | Expression inhibited 2 fold by EGFR |
| intestinal/tracheal | 30; 277(35): 32258-67 | antagonist in GEO colon cancer cell |
| (MUC2) | | line |
| intestinal mucin 3 | No | Expression inhibited 2 fold by EGFR |
| (MUC3) | | antagonist in GEO colon cancer cell |
| | | line |
| Homo sapiens cystic | No | Expression stimulated 2 fold by |
| fibrosis | | EGFR in H292 lung cancer cell line |
| transmembrane | | |
| conductance | | |
| regulator | | |
| ATP-binding | | |
| cassette (sub-family | | |
| C, member 7) | | |
| (CFTR) | | |
| f-spondin | No | Expression inhibited 2 fold by EGFR |
| (KIAA0762) protein | | antagonist in LOVO colon cancer cell |
| | | line |
| 3-hydroxy-3- | J Invest Dermatol. 2000 | Expression stimulated 3 fold by |
| methylglutaryl- | Jan; 114(1): 83-7 | EGFR in H292 lung cancer cell line |
| Coenzyme A | | |
| synthase 2 | | |
| serine (or cysteine) | Electrophoresis. 2001 | Expression stimulated 2 fold by |
| proteinase inhibitor, | Aug; 22(14): 3001-8. | EGFR in H292 lung cancer cell line |
| clade B | | |
| (ovalbumin), | | |
| member 5 | | |
| (SERPINB5 | | |
| BTG family, | No | Expression stimulated 2 fold by |
| member 2 (BTG2) | | EGFR in H292 lung cancer cell line |
| talin 2 (TLN2) | No | Expression inhibited 2 fold by EGFR |
| | | antagonist in GEO colon cancer cell |
| | | line |
| arachidonic acid | J Biol Chem. 1994 Aug | no |
| epoxygenase | 26; 269(34): 21786-92. | |
| prostaglandin G/H | J Biol Chem. 1994 Aug | Expression stimulated 6 fold by |
| synthase and | 26; 269(34): 21786-92. | EGFR in H292 lung cancer cell line |
| cyclooxygenase | | |
| EphA1 (EPHA1) | No | Expression stimulated 2 fold by |
| | | EGFR in CACO2 colon cancer cell |
| | | line |
| hemoglobin, alpha 1 | No | Expression inhibited 2 fold by EGFR |
| (HBA1) | | antagonist in GEO colon cancer cell |
| | | line |
| bone morphogenetic | Development 2000 | no |
| protein 2 | Nov; 127(22): 4993-5005 | |
| betacellulin (BTC)* | Biochem Biophys Res | no |
| | Commun. 2002 Jun | |
| | 28; 294(5): 1040-6 | |

*The gene betacellulin showed counter regulation with EGFR expression as defined for the EGFR-A list but had just a p value of 0.04 in the Student's TTest for correlation with IC₅₀. It was still selected as a top biomarker for the strong literature support, as betacellulin is one of the published ligands of EGFR.

Utility of Biomarkers

[0101] Polynucleotides that correlate to a specific property of a biological system can be used to make predictions about that biological system and other biological systems. To show the predictive utility of biomarkers that correlate to EGFR modulator sensitivity and resistance, these polynucleotides were tested for their ability to predict the response of twenty two colon cancer cell lines to a small molecule EGFR modulator.

[0102] The invention includes single biomarkers including, for example, the fourteen top biomarkers which were tested in a voting scheme. For that purpose, the mean expression value was calculated for all fourteen biomarkers. Colon cancer cell lines which showed an expression level above the mean were then voted to be sensitive, and colon cancer cell lines with expression levels below the mean were voted to be resistant. After this procedure, the voting was compared to the actual sensitivity/resistance status according to the definition based on IC₅₀ (see above) and an error rate was calculated. The error rates of the fourteen top biomarkers are shown in Table 6.

TABLE 6
Error Rates of Fourteen Top Biomarkers

| | Pearsons | TTEST | Prediction |
|---|---|---|---|
| Biomarker Name | value | P value | error rate |
| mucin 2, | −0.531 | 0.0083 | 20% |
| intestinal/tracheal | | | |
| (MUC2) | | | |
| intestinal mucin 3 | −0.639 | 0.0004 | 11.72% |
| (MUC3) | | | |
| Homo sapiens cystic | −0.646 | 9E−05 | 5.9% |
| fibrosis | | | |
| transmembrane | | | |
| conductance | | | |
| regulator | | | |
| ATP-binding | | | |
| cassette (sub-family | | | |
| C, member 7) | | | |
| (CFTR) | | | |
| f-spondin | −0.622 | 0.0004 | 12.8% |
| (KIAA0762) protein | | | |
| 3-hydroxy-3- | −0.575 | 0.0029 | 21.75% |
| methylglutaryl- | | | |
| Coenzyme A | | | |
| synthase 2 | | | |
| serine (or cysteine) | −0.62 | 0.0028 | 21.75% |
| proteinase inhibitor, | | | |
| clade B | | | |
| (ovalbumin), | | | |
| member 5 | | | |
| (SERPINB5 | | | |
| BTG family, | −0.544 | 0.0042 | 20.5% |
| member 2 (BTG2) | | | |
| talin 2 (TLN2) | −0.874 | 3E−05 | 8.8% |
| EphA1 (EPHA1) | −0.647 | 0.0021 | 22% |
| hemoglobin, alpha 1 | −0.744 | 8E−05 | 20% |
| (HBA1) | | | |
| bone morphogenetic | −0.555 | 0.0091 | 31.8% |
| protein 2 | | | |
| betacellulin (BTC) | −0.536 | 0.047 | 43.5% |

The biomarkers talin, the Cystic fibrosis conductance regulator (CFTR), and mucin 3 were the best single biomarkers with error rates below 12%.

### EXAMPLES

### Example 1

### Methods

IC₅₀ Determination—In Vitro Cytotoxicity Assay

[0103] A small molecule EGFR inhibitor, erlotinib HCl (BMS-461453), was tested for cytoxicity in vitro against a panel of twenty-two human colon cancer cell lines available from the American Type Culture Collection. Cytotoxicity was assessed in cells by MTS (3-(4,5-dimethylthiazol-2-yl)-5-(3-carboxymethoxyphenyl)-2-(4-sulphenyl)-2H-tetrazolium, inner salt) assay (T. L. Riss et al., 1992, Mol. Biol. Cell, 3 (Suppl.): 184a).

[0104] To carry out the assays, the colon cells were plated at 4,000 cell/well in 96 well microtiter plates and 24 hours later serial diluted drugs were added. The concentration range for the EGFR inhibitor was from 5 μg/ml to 0.0016 μg/ml (roughly 10 μM to 0.0032 μM). The cells were incubated at 37° C. for 72 hours at which time the tetrazolium dye MTS (333 μg/ml final concentration) in combination with the electron coupling agent phenazine methosulfate (25 μM final concentration) was added. A dehydrogenase enzyme in live cells reduces the MTS to a form that absorbs light at 492 nm that can be quantified spectrophotometrically. The greater the absorbency, the greater the number of live cells. The results were expressed as an IC₅₀, which is the drug concentration required to inhibit cell proliferation (i.e., absorbance at 450 mm) to 50% of that of untreated control cells. The mean IC₅₀ and standard deviation (SD) from multiple tests for each cell line were calculated.

Resistant/Sensitive Classification

[0105] The cell lines with IC₅₀ below 6 μM were defined as sensitive to the EGFR inhibitor, whereas those with IC₅₀ above 6 μM were considered to be resistant. The resistant/sensitive classification are shown above in Table 1, with five cell lines classified as sensitive and seventeen cell lines classified as resistant.

Gene Expression Profiling

[0106] The colon cells were grown using standard cell culture conditions: RPMI 1640 supplemented to contain 10% fetal bovine serum, 100 IU/ml penicillin, 100 mg/ml streptomycin, 2 mM L-glutamine and 10 mM Hepes (all from GibcoBRL, Rockville, Md.). RNA was isolated from 50-70% confluent cells or drug-treated cells using the RNeasy™ kits commercially available from Qiagen (Valencia, Calif.). Quality of the RNA was checked by measuring the 28s:18s ribosomal RNA ratio using Agilent 2100 bioanalyzer (Agilent, Technologies, Rockville, Md.). Concentration of total RNA was determined spectrophotometrically. 10 μg of total RNA from each cell line was used to prepare biotinylated probe according to the Affymetrix Genechip® Expression Analysis Technical Manual, 2001. Targets were hybridized to Affymetrix high density oligonucleotide array human HG-U133 set chips (Affymetrix, Santa Clara, Calif.). Arrays were then washed, and stained using the GeneChip Fluidics station according to the manufacture's instructions. The HG-U133 set consisting of two GeneChip® arrays contains nearly 45,000 probe sets representing more than 39,000 transcripts derived from approximately 33,000 well-substantiated human genes.

Preprocessing of Microarray Data for Selecting Biomarkers

[0107] Scanned image files were visually inspected for artifacts and analyzed with GeneChip® Expression Analysis software MAS 5.0 (Affymetrix, Santa Clara, Calif.). The “Detection Call” (see Affymetrix manual) was used to determine whether a transcript was detected within one sample, as well as the “Signal” (see Affymetrix Genechip® Expression Analysis Technical Manual, 2001) which measured the relative abundance of a transcript. The trimmed mean intensity for each chip was scaled to 1,500 (see Affymetrix manual) in order to account for any minor differences in global chip intensity, so that the overall expression level for each cell line is comparable. Affymetrix control sequences were removed prior to analysis.

Induction Studies of Colon and Breast Cell Lines with EGFR Inhibitors or EGFR Ligand and Selection of Genes Modulated by the Inductions

[0108] The five colon cell lines and one lung cell line indicated with asterisks in Table 1 were used in the drug induction study. Three of the colon cell lines express EGFR and are sensitive to the EGFR inhibitor BMS461453. The SW480 cell line, while expressing EGFR, is insensitive to the EGFR inhibitor, and the COLO320_DM does not express EGFR and is EGFR inhibitor resistant. The lung cancer cell line H292 expresses EGFR, but its sensitivity status is unknown. Cells were seeded in a 10 cm² culture plate with the medium described above and cultured for 24 hours.

[0109] For the EGF induction studies, the colon cell line CACO2 and the lung cancer H292 cell line were washed 2×PBS, and the media was changed to RPMI without serum. The next day the cells were treated with 20 ng/ml EGF, and eventually lysed for RNA isolation 0.5, 6 and 18 hours post treatment. Gene expression was profiled as described below.

[0110] EGFR inhibition studies were conducted on the colon cell lines GEO, CCD33-CO, SW480 and COLO320DM. The expression profiling was performed as described above and data was analyzed using GeneChip® Expression Analysis software MAS 5.0. The expression data of EGFR inhibitor treated cell lines were compared pair-wise to that of untreated same cell line. A change was considered significant if a two fold difference in expression was demonstrated between the treated and the untreated control. Analysis was done for all four cell lines to compare the gene expression with or without EGFR inhibitor treatment.

### Example 2

### RT-PCR Expression Profiling

[0111] RNA quantification was performed using the SYBR Green real-time PCR. The SYBR Green real-time PCR assay is one of the most precise methods for assaying the concentration of nucleic acid templates.

[0112] RNA can be prepared using standard methods, preferably, employing the RNeasy Kit commercially available from Qiagen (Valencia, Calif.). cDNA template for real-time PCR can be generated using the Superscript™ First Strand Synthesis system for RT-PCR. SYBR Green real-time PCR reactions are prepared as follows: the reaction mix contains 20 ng first strand cDNA; 50 nM Forward Primer; 50 nM Reverse Primer; 0.75×SYBR Green I (Sigma); 1×SYBR Green PCR Buffer (50 mMTris-HCl pH 8.3, 75 mM KCl); 10% DMSO; 3 mM MgCl₂; 300 μM each dATP, dGTP, dTTP, dCTP; 1 U Platinum® Taq DNA Polymerase High Fidelity (Cat# 11304-029; Life Technologies; Rockville, Md.). Real-time PCR is performed using an Applied Biosystems 5700 Sequence Detection System. Conditions are 95° C. for 10 minutes (denaturation and activation of Platinum® Taq DNA Polymerase), 40 cycles of PCR (95° C. for 15 seconds, 60° C. for 1 minute). PCR products are analyzed for uniform melting using an analysis algorithm built into the 5700 Sequence Detection System.

[0113] cDNA quantification used in the normalization of template quantity is performed using SYBR Green real-time PCR Expression of EGFR is normalized to GAPDH expression as described below.

[0114] The sequences for the GAPDH oligonucleotides used in the SYBR Green real-time PCR reactions are:

| | |
|---|---|
| GAPDH-F: 5′-AGCCGAGCCACATCGCT-3′ | (SEQ ID NO: 191) |
| GAPDH-R: 5′-GTGACCAGGCGCCCAATAC-3′ | (SEQ ID NO: 192) |

[0115] The sequences for the EGFR oligonucleotides used in the SYBR Green real-time PCR reactions are:

(SEQ ID NO: 193)

EGFR-F: 5′-GCGTCTCTTGCCGGAATGT-3′

(SEQ ID NO: 194)

EGFR-R: 5′-AGCCGAGGCAGGGAATGCGTG-3′

[0116] The Sequence Detection System generates a Ct (threshold cycle) value that is used to calculate a concentration for each input cDNA template. cDNA levels for each gene of interest are normalized to GAPDH cDNA levels to compensate for variations in total cDNA quantity in the input sample. This is done by generating GAPDH Ct values for each cell line. Ct values for the gene of interest and GAPDH are inserted into a modified version of the δδCt equation (Applied Biosystems Prism® 5700 Sequence Detection System User Manual) which is used to calculate a GAPDH normalized relative cDNA level for each specific cDNA. The δδCt equation is: relative quantity of nucleic acid template=2^{δδCt}=2^{(δCta-δCtb)}, where δCta=Ct target−Ct GAPDH, and δCtb=Ct reference−Ct GAPDH.

### Example 3

### Production of Antibodies Against the Biomarkers

[0117] Antibodies against the biomarkers can be prepared by a variety of methods. For example, cells expressing an biomarker polypeptide can be administered to an animal to induce the production of sera containing polyclonal antibodies directed to the expressed polypeptides. In one aspect, the biomarker protein is prepared and isolated or otherwise purified to render it substantially free of natural contaminants, using techniques commonly practiced in the art. Such a preparation is then introduced into an animal in order to produce polyclonal antisera of greater specific activity for the expressed and isolated polypeptide.

[0118] In one aspect, the antibodies of the invention are monoclonal antibodies (or protein binding fragments thereof). Cells expressing the biomarker polypeptide can be cultured in any suitable tissue culture medium, however, it is preferable to culture cells in Earle's modified Eagle's medium supplemented to contain 10% fetal bovine serum (inactivated at about 56° C.), and supplemented to contain about 10 g/l nonessential amino acids, about 1,00 U/ml penicillin, and about 100 μg/ml streptomycin.

[0119] The splenocytes of immunized (and boosted) mice can be extracted and fused with a suitable myeloma cell line. Any suitable myeloma cell line can be employed in accordance with the invention, however, it is preferable to employ the parent myeloma cell line (SP2/0), available from the ATCC. After fusion, the resulting hybridoma cells are selectively maintained in HAT medium, and then cloned by limiting dilution as described by Wands et al. (1981, Gastroenterology, 80:225-232). The hybridoma cells obtained through such a selection are then assayed to identify those cell clones that secrete antibodies capable of binding to the polypeptide immunogen, or a portion thereof.

[0120] Alternatively, additional antibodies capable of binding to the biomarker polypeptide can be produced in a two-step procedure using anti-idiotypic antibodies. Such a method makes use of the fact that antibodies are themselves antigens and, therefore, it is possible to obtain an antibody that binds to a second antibody. In accordance with this method, protein specific antibodies can be used to immunize an animal, preferably a mouse. The splenocytes of such an immunized animal are then used to produce hybridoma cells, and the hybridoma cells are screened to identify clones that produce an antibody whose ability to bind to the protein-specific antibody can be blocked by the polypeptide. Such antibodies comprise anti-idiotypic antibodies to the protein-specific antibody and can be used to immunize an animal to induce the formation of further protein-specific antibodies.

### Example 4

### Immunofluorescence Assays

[0121] The following immunofluorescence protocol may be used, for example, to verify EGFR biomarker protein expression on cells or, for example, to check for the presence of one or more antibodies that bind EGFR biomarkers expressed on the surface of cells. Briefly, Lab-Tek II chamber slides are coated overnight at 4° C. with 10 micrograms/milliliter (μg/ml) of bovine collagen Type II in DPBS containing calcium and magnesium (DPBS++). The slides are then washed twice with cold DPBS++ and seeded with 8000 CHO-CCR5 or CHO pC4 transfected cells in a total volume of 125 μl and incubated at 37° C. in the presence of 95% oxygen/5% carbon dioxide.

[0122] The culture medium is gently removed by aspiration and the adherent cells are washed twice with DPBS+ at ambient temperature. The slides are blocked with DPBS++ containing 0.2% BSA (blocker) at 0-4° C. for one hour. The blocking solution is gently removed by aspiration, and 125 μl of antibody containing solution (an antibody containing solution may be, for example, a hybridoma culture supernatant which is usually used undiluted, or serum/plasma which is usually diluted, e.g., a dilution of about 1/100 dilution). The slides are incubated for 1 hour at 0-4° C. Antibody solutions are then gently removed by aspiration and the cells are washed five times with 400 μl of ice cold blocking solution. Next, 125 μl of 1 μg/ml rhodamine labeled secondary antibody (e.g., anti-human IgG) in blocker solution is added to the cells. Again, cells are incubated for 1 hour at 0-4° C.

[0123] The secondary antibody solution is then gently removed by aspiration and the cells are washed three times with 400 μl of ice cold blocking solution, and five times with cold DPBS++. The cells are then fixed with 125 μl of 3.7% formaldehyde in DPBS++ for 15 minutes at ambient temperature. Thereafter, the cells are washed five times with 400 μl of DPBS++ at ambient temperature. Finally, the cells are mounted in 50% aqueous glycerol and viewed in a fluorescence microscope using rhodamine filters.

What is claimed is:

1. A method for identifying a mammal that will respond therapeutically to a method of treating cancer comprising administering an EGFR modulator, wherein the method comprises:
(a) measuring in the mammal the level of at least one biomarker selected from the biomarkers of Table 4;
(b) exposing the mammal to the EGFR modulator;
(c) following the exposing of step (b), measuring in the mammal the level of the at least one biomarker,
wherein a difference in the level of the at least one biomarker measured in step (c) compared to the level of the at least one biomarker measured in step (a) indicates that the mammal will respond therapeutically to said method of treating cancer.

2. The method of claim 1 wherein the at least one biomarker is selected from the biomarkers of Table 5.

3. The method of claim 1 wherein the method is an in vitro method, and wherein the at least one biomarker is measured in at least one mammalian biological sample from the mammal.

4. A method for identifying a mammal that will respond therapeutically to a method of treating cancer comprising administering an EGFR modulator, wherein the method comprises:
(a) exposing the mammal to the EGFR modulator;
(b) following the exposing of step (a), measuring in the mammal the level of the at least one biomarker selected from the biomarkers of Table 4,
wherein a difference in the level of the at least one biomarker measured in step (b), compared to the level of the biomarker in a mammal that has not been exposed to said EGFR modulator, indicates that the mammal will respond therapeutically to said method of treating cancer.

The application's sequence listing, which the Patent Office published only in electronic form, follows.

SEQUENCE LISTING (194 sequences)

SEQ ID NO: 1 - DNA, 2058 bp, Human
cggtttctgctgggtttctgaactgctgggtttctgcttgctcctctggagatgcagcgtctgttgactccagtgaagcgcattctgcaactgacaagagcggtgcaggaaacctccctcacacctgctcgcctgctcccagtagcccaccaaaggttttctacagcctctgctgtccccctggccaaaacagatacttggccaaaggacgtgggcatcctggccctggaggtctacttcccagcccaatatgtggaccaaactgacctggagaagtataacaatgtggaagcaggaaagtatacagtgggcttgggccagacccgtatgggcttctgctcagtccaagaggacatcaactccctgtgcctgacggtggtgcaacggctgatggagcgcatacagctcccatgggactctgtgggcaggctggaagtaggcactgagaccatcattgacaagtccaaagctgtcaaaacagtgctcatggaactcttccaggattcaggcaatactgatattgagggcatagataccaccaatgcctgctacggtggtactgcctccctcttcaatgctgccaactggatggagtccagttcctgggatggtcgttatgccatggtggtctgtggagacattgccgtctatcccagtggtaatgctcgtcccacaggtggggccggagctgtggctatgctgattggcccaaaggcccctctggccctggagcgagggctgaggggaacccatatggagaatgtgtatgacttctacaaaccaaatttggcctcggagtacccaatagtggatgggaagctttccatccagtgctacttgcgggccttggatcgatgttacacatcataccgtaaaaaaatccagaatcagtggaagcaagctggcagcgatcgacccttcacccttgacgatttacagtatatgatctttcatacacccttttgcaagatggtccagaagtctctggctcgcctgatgttcaatgacttcctgtcagccagcagtgacacacaaaccagcttatataaggggctggaggctttcggggggctaaagctggaagacacctacaccaacaaggacctggataaagcacttctaaaggcctctcaggacatgttcgacaagaaaaccaaggcttccctttacctctccactcacaatgggaacatgtacacctcatccctgtacgggtgcctggcctcgcttctgtcccaccactctgcccaagaactggctggctccaggattggtgccttctcttatggctctggtttagcagcaagtttcttttcatttcgagtatcccaggatgctgctccaggctctcccctggacaagttggtgtccagcacatcagacctgccaaaacgcctagcctcccgaaagtgtgtgtctcctgaggagttcacagaaataatgaaccaaagagagcaattctaccataaggtgaatttctccccacctggtgacacaaacagccttttcccaggtacttggtacctggagcgagtggacgagcagcatcgccgaaagtatgcccggcgtcccgtctaaaggtgttctgcagatccatggaaagcttcctgggaaacgtatgctagcagagcttctccccgtgaatcatatttttaagatcccactcttagctggtaaatgaatttgaatcgacatagtagccccataagcatcagccctgtagagtgaggagccatctctagcgggcccttcattcctctccatgctgcaatcactgtcctgggcttatggtgcctatggactaggggtcctttgtgaaagagcaagatggagcaatggagagaagacctcttcctgaatcactggactccagaaatgtgcatgcagatcagctgttgccttcaagatccagataaactttcctgtcatgtgttagaactttattattattaatattgttaaacttctgtgctgttcctgtgaatctccaaattttgtaccttgttctaagctaatatatagcaattaaaaagagagaaagagaaaaaaaaaaaaaaa

SEQ ID NO: 2 - DNA, 532 bp, Human
  misc_feature (519)..(519): n is a, c, g, or t
taactatggaaaaccatgtttatttttaataaaggatgacatttccaatcagtaaaatatcataaaagtataaaaatgtactaagtacaatcattagcattatgttataggggaatagtggttataacttttccctgtaagatggcacattggatggtcacagttggcttgatttacagaggggcaagagtaggtgaccagttgtaccagttgctccagtttcctaggatttgggactcttgtaaaatgagaaagtcccaggcaaactgggacggttggtcctacaagaaaaagagcagcatcagagtgttggctatagtttggaacttaggaacaggatcagacattattttttaacttctccacctattttccctttagctgtgaaataaaaatcccttttgttattactgagggtgttacagctttcagaggcttttttaccactgggtttcatgtaattttgacttaatacctatgtcaagcctgggaagaaaggcagttctaatcaacttgcangtgtggcattctg

SEQ ID NO: 3 - DNA, 1547 bp, Human
ggggacttcttgaacttgcagggagaataacttgcgcaccccactttgcgccggtgcctttgccccagcggagcctgcttcgccatctccgagccccaccgcccctccactcctcggccttgcccgacactgagacgctgttcccagcgtgaaaagagagactgcgcggccggcacccgggagaaggaggaggcaaagaaaaggaacggacattcggtccttgcgccaggtcctttgaccagagtttttccatgtggacgctctttcaatggacgtgtccccgcgtgcttcttagacggactgcggtctcctaaaggtcgaccatggtggccgggacccgctgtcttctagcgttgctgcttccccaggtcctcctgggcggcgcggctggcctcgttccggagctgggccgcaggaagttcgcggcggcgtcgtcgggccgcccctcatcccagccctctgacgaggtcctgagcgagttcgagttgcggctgctcagcatgttcggcctgaaacagagacccacccccagcagggacgccgtggtgcccccctacatgctagacctgtatcgcaggcactcaggtcagccgggctcacccgccccagaccaccggttggagagggcagccagccgagccaacactgtgcgcagcttccaccatgaagaatctttggaagaactaccagaaacgagtgggaaaacaacccggagattcttctttaatttaagttctatccccacggaggagtttatcacctcagcagagcttcaggttttccgagaacagatgcaagatgctttaggaaacaatagcagtttccatcaccgaattaatatttatgaaatcataaaacctgcaacagccaactcgaaattccccgtgaccagacttttggacaccaggttggtgaatcagaatgcaagcaggtgggaaagttttgatgtcacccccgctgtgatgcggtggactgcacagggacacgccaaccatggattcgtggtggaagtggcccacttggaggagaaacaaggtgtctccaagagacatgttaggataagcaggtctttgcaccaagatgaacacagctggtcacagataaggccattgctagtaacttttggccatgatggaaaagggcatcctctccacaaaagagaaaaacgtcaagccaaacacaaacagcggaaacgccttaagtccagctgtaagagacaccctttgtacgtggacttcagtgacgtggggtggaatgactggattgtggctcccccggggtatcacgccttttactgccacggagaatgcccttttcctctggctgatcatctgaactccactaatcatgccattgttcagacgttggtcaactctgttaactctaagattcctaaggcatgctgtgtcccgacagaactcagtgctatctcgatgctgtaccttgacgagaatgaaaaggttgtattaaagaactatcaggacatggttgtggagggttgtgggtgtcgctagtacagcaaaattaaatacataaatatatatata

SEQ ID NO: 4 - DNA, 5019 bp, Human
gcctccgctgcagtcgctgcgtctccaagcaacatggctgacaaggccaagcctgccaaagctgccaacaggacgccccccaagtccccgggggacccctcgaaggaccgggcagccaagaggctgtcgctggaatcggagggtgctggtgagggggcagccgcatcccctgagctcagtgccctggaggaggccttccggcgctttgccgtgcacggggacgccagggccaccgggagggagatgcacggcaagaactggtcgaagctgtgcaaggactgccaggtgatcgacggcaggaacgtgaccgtcactgacgtggacatcgtcttcagcaagatcaaagggaagtcttgccggaccatcacctttgagcagttccaggaggcgctggaggagctcgccaagaagcgattcaaagacaagagcagcgaggaggccgttcgcgaggtgcacaggctcatcgagggcaaggcgcccatcatctcaggggtgacgaaagccatctcgtcgcccacagtgtcgaggctcacggacaccaccaagttcacgggctcccacaaggagcgcttcgacccctctggcaagggcaagggcaaggctggccgcgtggatctggtggacgagtcaggctatgtgtccggctacaagcacgcaggcacctacgaccagaaggtgcaagggggcaagtagcccccgctccatgcctcgcggcactgccggtgtccccagagcagggactctgtcacctcgcacttcattacattcctgtactaactggggcagaactcagacgggtgccccagagggggctggggggcggccaggcccaggcctccctcctgcccctcctcctaccggatgcccccagcactcccctctcaaaccaggtttgggccccagttcgctgaccctcctaatacacctgcctcgtcctcagccatttccaaagtgtctcgcggatcacaccacactgggcacgtggtttgcaggtcaaaggggcgttttaaagcagctggctgtcatggcaacaggaggctgtgctgacctcctgagcggcagacaccttccaggagccctgagggtggcaggagctaaccccaaccagcaggcaactaacacggaattggccccacaccggacgtgggaggtgtctgtggggcccgaggcctgtcctgtgtgcagcggacaccacggggccttcctgctttcctgggcagagggcagagtgaggccacctggcgggggtgctgggcgcctggcacatgtgtggggaagccggtcacatggacacacctgtgcacacatgcctacaggccagctctgtgccaagggcaacctaggtaaaacgaaagccgtcaggggcagtgggcggcttcccggctgaccacagtggcttggactgtgagggtagagtaggctcgctttgctttcctgagaagatgcggtggctgcctatgttctcagagcgggtctgggaagattcagaatgtccggtccctgtggtgttgccaggcaagagacacgaagtgccgagacactcctcgcctcaccgcgtgacagagcctctgcccggccctcccgttcgcccgtcctcactagctgcaccctgtttgctcgcagacctcccattgccacagcccaagcaccttcttcaactctcccaaaatggctcagcctaacctctcctggccaatcccccccgccggagagcaggacactagggaggacccccagtcctgcagtgtctgtgggggtttctctgccagcagggggctgagcagagcccatccaggacactccacactgccaggacacacccaggcggcccgcccttgcctgtctgcacctggggagaagccggcgctcctgctccctcctggggaggctgacgggtgtggccacccgctgtcacaatggcacactgccactgtcccttggcacgcacacagccacagccacacgtgtgacctgctgggccgtggttctggagtctacctgcggatgagcctgcggcagtcctggggaaacttttccagagcctgttagcccgtggctacggtcaggctctggccagggcagagggctgcccagggccaggctcacagtacaggagggtggcgaggcccctccctcactggcacgcatgagcaccacccgcctccccgactcccaagagtgcacctgctgcggccacagctccgtggaaggactccccctacctgagcagagcagaagccccagggcggagctcccagccagcatggtccgctgagggctggggggcggtctccgaggcccctcaacagagaagcctccacctgaggatggggaggacctggcaggcagcttccacggcagggctgggaagttcagtgcctggaaataaagagcaaggaaaaatggacctcaggcttcgtggctcctttaggatgtcacctcaccggcctggggaaggcggggggtgcccaagcccagccctgtgcccccgctgaacctggctggaccgcgtgtgaaaggcagaactaacgtgcggaaacatttgaaaacaactctgaatgtgcggttcggaatcacccgatcacagacgagcggtcaccggaatcgcccggtcacagacgagcagtcatcggactcacccgatcacagacgagcggtcaccggaatcgcccgatcacagacgagcggccaccggaatcgcccaatcacagacaagcagtcatcggaatcacccgatcacagacgagcagtcatcggactcacccgatcacagacgagcggtcaccagactcgcccgatcacagacgagcagtcatcggaatcacccgatcacagacgagcagtcatcggactcacccgatcacagacgagcggtcaccagaatcgcccgatcacagacgagcagtcatcggaatcacccgatcacagacgagtggccaccggaatcacccgataacagcccatcacaactccaaagcccttgtgttgaaaaggccgaggacgagtggtcaccaaacagggtggctccccaggtcccgaagcctgagacccggaaggccctggcacccttacaccctcggactcctgccctcctcggcctccctggccccagcgcggctccaccctgggctgcgtctcctggtcacaggctgcgtttctcctttctgtccgtgggcagcccagtccccacagtcacggccaagccacgcagaacgaacatgactccagaggacctcgccctggagctgagcctggcgccgggtcaggacggagggaagggcgggttggggtccgcgggtcctcacaccgcacggcaggcacagaggctcgccaggccctgatccggtctgtggggacgagggacactgaggagaggtgctgggcaccaggacgctgcctcctggtccctggttggcctcagacaagcacggcctcgagaaaagagccaagcgcatcgggagcacaccagaaaccggccctgagcacgagaagagcctccgcccggcccgggcaccacccgacctcgcagggagcaggccctgtcaccgacgggtcacctcgcccacacggccagcaccgactcaccacagcccttcccagacctggctggagtggccggagcggcggggctcatggctcccatcttggcccctggaggtgagctcattcacagaagtggtcccttcactctgagagagaaaatcgtggcgtgcatcccaaaccctaggccacgcctgtgggtttcgtgaatgagatcgaggctgctgtggcaccctgcccgtcctggcctggagcaccctgggatcctggagggagaggccccacgcccccactctccctccacacttccagggttggtgcccacgagttagaggcacggcctcccccagcggccctcaggcttttctcagacatgcgggagccaggagagcacccttctccactcagctccaaagcgaatctttgaaaacacccactcggctcccatctctgtcacctagccaggaggggtagcaaaaataaagtcacgaggacatagtggtcaccactgtcagttacaacttgtctgtggaatccgtaattgcatctgtgtgccgcctccgaacacagaacattgtttggacggcagccccactgcacataacagacccgtgcatcttcctcagtcagtttctgaatattgtgaattcaggcaggtgtgtgttctcttctgcatgtttttatgcactgccaattagcttctactaaccacggttcaacagaaaataaatgtgtatttgtgaataacaaactgcacaacctgcaaaccaggagagagggacaggttctgtcaggggtgacaccaggacacagggacaggttctgtcgggggtgacaccaggacacagggacaggttctgtcatgggtgacacgaggacacagggacaggttctatcatgggtgacaccaggagagagggacaggttctgttgggggtgacaagaggagacagggacaggttctgtcgggggtgacaccaggagagagggacaggttctgtcaggggtgacaccaggagagagggacaggttctgttgggggtgacaccaggacacaggaataggttctgtcgggaggacagtgctgatcgtgtctcagcatcaggaaaggagaaaggcagagggagagcgctgagaagactgttcacgccagagtgcttatttatttttaatttactgctataggataagcaaccaggtagtgttcctaacaattagcgttaccaaaattaaagttcaaattatatgtttaaaatattgtagaagatatatatttatactggactacttttacaccttctaatatcctgtccaagtttgggcgcagatggtggagttgggctggcatcatgtcctgtggccgccccacttgcctgttggtgccactccatcccgggccccagggatgccagctcagggctgaccacagcagccctgcgtgggcatcacctcctaccccagcccccatcctgggctgct

SEQ ID NO: 5 - DNA, 1155 bp, Human
atggattgcagtaacggatcggcagagtgtaccggagaaggaggatcaaaagaggtggtggggacttttaaggctaaagacctaatagtcacaccagctaccattttaaaggaaaaaccagaccccaataatctggtttttggaactgtgttcacggatcatatgctgacggtggagtggtcctcagagtttggatgggagaaacctcatatcaagcctcttcagaacctgtcattgcaccctggctcatcagctttgcactatgcagtggaattatttgaaggattgaaggcatttcgaggagtagataataaaattcgactgtttcagccaaacctcaacatggatagaatgtatcgctctgctgtgagggcaactctgccggtatttgacaaagaagagctcttagagtgtattcaacagcttgtgaaattggatcaagaatgggtcccatattcaacatctgctagtctgtatattcgtcctgcattcattggaactgagccttctcttggagtcaagaagcctaccaaagccctgctctttgtactcttgagcccagtgggaccttatttttcaagtggaacctttaatccagtgtccctgtgggccaatcccaagtatgtaagagcctggaaaggtggaactggggactgcaagatgggagggaattacggctcatctctttttgcccaatgtgaagacgtagataatgggtgtcagcaggtcctgtggctctatggcagagaccatcagatcactgaagtgggaactatgaatctttttctttactggataaatgaagatggagaagaagaactggcaactcctccactagatggcatcattcttccaggagtgacaaggcggtgcattctggacctggcacatcagtggggtgaatttaaggtgtcagagagatacctcaccatggatgacttgacaacagccctggaggggaacagagtgagagagatgtttagctctggtacagcctgtgttgtttgcccagtttctgatatactgtacaaaggcgagacaatacacattccaactatggagaatggtcctaagctggcaagccgcatcttgagcaaattaactgatatccagtatggaagagaagagagcgactggacaattgtgctatcctga

SEQ ID NO: 6 - DNA, 2717 bp, Human
cagggtaacgctgtcttgtggacccgcacttcccacccgagacctctcactgagcccgagccgcgcgcgacatgagccacgggaagggaaccgacatgctcccggagatcgccgccgccgtgggcttcctctccagcctcctgaggacccggggctgcgtgagcgagcagaggcttaaggtcttcagcggggcgctccaggaggcactcacagagcactacaaacaccactggtttcccgaaaagccgtccaagggctccggctaccgctgcattcgcatcaaccacaagatggaccccatcatcagcagggtggccagccagatcggactcagccagccccagctgcaccagctgctgcccagcgagctgaccctgtgggtggacccctatgaggtgtcctaccgcattggggaggacggctccatctgcgtcttgtacgaggaggccccactggccgcctcctgtgggctcctcacctgcaagaaccaagtgctgctgggccggagcagcccctccaagaactacgtgatggcagtctccagctaggcccttccgcccccgccctgggcgccgccgtgctcatgctgccgtgacaacaggccaccacatacctcaacctggggaactgtatttttaaatgaagagctatttatatatattatttttttttaagaaaggaggaaaagaaaccaaaagttttttttaagaaaaaaaatccttcaagggagctgcttggaagtggcctccccaggtgcctttggagagaactgttgcgtgcttgagtctgtgagccagtgtctgcctataggagggggagctgttagggggtagacctagccaaggagaagtgggagacgtttggctagcaccccaggaagatgtgagagggagcaagcaaggttagcaactgtgaacagagaggtcgggatttgccctgggggaggaagagaggccaagttcagagctctctgtctcccccagccagacacctgcatccctggctcctctattactcaggggcattcatgcctggacttaaacaatactatgttatcttttcttttatttttctaatgaggtcctgggcagagagtgaaaaggcctctcctgattcctactgtcctaagctgcttttcttgaaatcatgacttgtttctaattctaccctcaggggcctgtagatgttgctttccagccaggaatctaaagctttgggttttctgagggggggaggagggaactggaggttattggggttaggatggaagggaactctgcacaaaacctttgctttgctagtgctgctttgtgtgtatgtgtggcaaataatttgggggtgatttgcaatgaaattttgggacccaaagagtatccactggggatgttttttggccaaaactcttccttttggaaccacatgaaagtcttgatgctgctgccatgatccctttgagaggtggctcaaaagctacagggaactccaggtcctttattactgccttcttttcaaaagcacaactctcctctaaccctcccctcccccttcccttctggtcgggtcatagagctaccgtattttctaggacaagagttctcagtcactgtgcaatatgccccctgggtcccaggagggtctggaggaaaactggctatcagaacctcctgatgccctggtgggcttagggaaccatctctcctgctctccttgggatgatggctggctagtcagccttgcatgtattccttggctgaatgggagagtgccccatgttctgcaagactacttggtattcttgtagggccgacactaaataaaagccaaaccttgggcactgttttttctccctggtgctcagagcacctgtgggaaaggttgctgtctgtctcagtacaatccaaatttgtcgtagacttgtgcaatatatactgttgtgggttggagaaaagtggaaagctacactgggaagaaactcccttccttcaatttctcagtgacattgatgaggggtcctcaaaagacctcgagtttcccaaaccgaatcaccttaagaaggacagggctagggcatttggccaggatggccaccctcctgctgttgccccttagtgaggaatcttcaccccacttcctctacccccaggttctcctccccacagccagtcccctttcctggatttctaaactgctcaattttgactcaaaggtgctatttaccaaacactctccctacccattcctgccagctctgcctccttttcaactctccacattttgtattgccttcccagacctgcttccagtctttattgctttaaagttcactttgggcccacagacccaagagctaattttctggtttgtgggttgaaacaaagctgtgaatcactgcaggctgtgttcttgcatcttgtctgcaaacaggtccctgcctttttagaagcagcctcatggtctcatgcttaatcttgtctctcttctcttctttatgatgttcactttaaaaacaacaaaacccctgagctggactgttgagcaggcctgtctctcctattaagtaaaaataaatagtagtagtatgtttgtaagctattctgacagaaaagacaaaggttactaattgtatgatagtgtttttatatggaagaatgtacagcttatggacaaatgtacacctttttgttactttaataaaaatgtagtaggataaaaaaaaa

SEQ ID NO: 7 - DNA, 2249 bp, Human
ctcctctacaaagaggtggacagagaagacagcagagaccatgggacccccctcagcccctccctgcagattgcatgtcccctggaaggaggtcctgctcacagcctcacttctaaccttctggaacccacccaccactgccaagctcactattgaatccacgccattcaatgtcgcagaggggaaggaggttcttctactcgcccacaacctgccccagaatcgtattggttacagctggtacaaaggcgaaagagtggatggcaacagtctaattgtaggatatgtaataggaactcaacaagctaccccagggcccgcatacagtggtcgagagacaatataccccaatgcatccctgctgatccagaacgtcacccagaatgacacaggattctataccctacaagtcataaagtcagatcttgtgaatgaagaagcaaccggacagttccatgtatacccggagctgcccaagccctccatctccagcaacaactccaaccccgtggaggacaaggatgctgtggccttcacctgtgaacctgaggttcagaacacaacctacctgtggtgggtaaatggtcagagcctcccggtcagtcccaggctgcagctgtccaatggcaacatgaccctcactctactcagcgtcaaaaggaacgatgcaggatcctatgaatgtgaaatacagaacccagcgagtgccaaccgcagtgacccagtcaccctgaatgtcctctatggcccagatgtccccaccatttccccctcaaaggccaattaccgtccaggggaaaatctgaacctctcctgccacgcagcctctaacccacctgcacagtactcttggtttatcaatgggacgttccagcaatccacacaagagctctttatccccaacatcactgtgaataatagcggatcctatatgtgccaagcccataactcagccactggcctcaataggaccacagtcacgatgatcacagtctctggaagtgctcctgtcctctcagctgtggccaccgtcggcatcacgattggagtgctggccagggtggctctgatatagcagccctggtgtattttcgatatttcaggaagactggcagattggaccagaccctgaattcttctagctcctccaatcccattttatcccatggaaccactaaaaacaaggtctgctctgctcctgaagccctatatgctggagatggacaactcaatgaaaatttaaagggaaaaccctcaggcctgaggtgtgtgccactcagagacttcacctaactagagacagtcaaactgcaaaccatggtgagaaattgacgacttcacactatggacagcttttcccaagatgtcaaaacaagactcctcatcatgataaggctcttacccccttttaatttgtccttgcttatgcctgcctctttcgcttggcaggatgatgctgtcattagtatttcacaagaagtagcttcagagggtaacttaacagagtgtcagatctatcttgtcaatcccaacgttttacataaaataagagatcctttagtgcacccagtgactgacattagcagcatctttaacacagccgtgtgttcaaatgtacagtggtccttttcagagttggacttctagactcacctgttctcactccctgttttaattcaacccagccatgcaatgccaaataatagaattgctccctaccagctgaacagggaggagtctgtgcagtttctgacacttgttgttgaacatggctaaatacaatgggtatcgctgagactaagttgtagaaattaacaaatgtgctgcttggttaaaatggctacactcatctgactcattctttattctattttagttggtttgtatcttgcctaaggtgcgtagtccaactcttggtattaccctcctaatagtcatactagtagtcatactccctggtgtagtgtattctctaaaagctttaaatgtctgcatgcagccagccatcaaatagtgaatggtctctctttggctggaattacaaaactcagagaaatgtgtcatcaggagaacatcataacccatgaaggataaaagccccaaatggtggtaactgataatagcactaatgctttaagatttggtcacactctcacctaggtgagcgcattgagccagtggtgctaaatgctacatactccaactgaaatgttaaggaagaagatagatccaaaaaaaaaaaaaaaaaa

SEQ ID NO: 8 - DNA, 3583 bp, Human
gcttctaaagtgaagattcagttttcacttaaacaaccagcaagtcttgaagtctcttcccaagcaaatgggagcttctttggaccttggagcacacagaggattctactttctttaaaactttgttttcaggcaatttccctgagaaccgtttacttccagaagattggtggagcttgatctgaaggctggccatgaaatctcaaggtcaacattggtattccagttcagataaaaactgtaaagtgagctttcgtgagaagcttctgattattgattcaaacctgggggtccaagatgtggagaacctcaagtttctctgcataggattggtccccaacaagaagctggagaagtccagctcagcctcagatgtttttgaacatctcttggcagaggatctgctgagtgaggaagaccctttcttcctggcagaactcctctatatcatacggcagaagaagctgctgcagcacctcaactgtaccaaagaggaagtggagcgactgctgcccacccgacaaagggtttctctgtttagaaacctgctctacgaactgtcagaaggcattgactcagagaacttaaaggacatgatcttccttctgaaagactcgcttcccaaaactgaaatgacctccctaagtttcctggcatttctagagaaacaaggtaaaatagatgaagataatctgacatgcctggaggacctctgcaaaacagttgtacctaaacttttgagaaacatagagaaatacaaaagagagaaagctatccagatagtgacacctcctgtagacaaggaagccgagtcgtatcaaggagaggaagaactagtttcccaaacagatgttaagacattcttggaagccttaccgagggcagctgtgtacaggatgaatcggaaccacagaggcctctgtgtcattgtcaacaaccacagctttacctccctgaaggacagacaaggaacccataaagatgctgagatcctgagtcatgtgttccagtggcttgggttcacagtgcatatacacaataatgtgacgaaagtggaaatggagatggtcctgcagaagcagaagtgcaatccagcccatgccgacggggactgcttcgtgttctgtattctgacccatgggagatttggagctgtctactcttcggatgaggccctcattcccattcgggagatcatgtctcacttcacagccctgcagtgccctagactggctgaaaaacctaaactctttttcatccaggcctgccaaggtgaagagatacagccttccgtatccatcgaagcagatgctctgaaccctgagcaggcacccacttccctgcaggacagtattcctgccgaggctgacttcctacttggtctggccactgtcccaggctatgtatcctttcggcatgtggaggaaggcagctggtatattcagtctctgtgtaatcatctgaagaaattggtcccaagacatgaagacatcttatccatcctcactgctgtcaacgatgatgtgagtcgaagagtggacaaacagggaacaaagaaacagatgccccagcctgctttcacactaaggaaaaaactagtattccctgtgcccctggatgcactttcaatatagcagagagtttttgttggttcttagacctcaaacgaatcattgggtataacctccagcctcctgcccagcacaggaatcggtggtctccacctgtcattctagaaacaggaaacaccgtgttttctgacacagtcaattctgattttctttttcttttgcaagtctaaatgttagaaaactttctttttttggagatagtctcattctgtcacccagactggagtgcaggggggcaatcacggctcactgtagtctcgacctcccaggctcaagctgtcctcccacctcagcctcccaagtagctgagactacaggtgtgtgtccatgcacagctaactttttattttttttgtggagatggggtttcactatgttgcctaagctggtctcaaactcctgggctcaagcgatcctcccacctcagcttctcaaagttctgggactacaggcatgaaatactgtgcctggcctggggaccaggtgcattttaaggttccttggtgttcaaaaaccacgttcttagcctagattgagcttagattgcctctctagacaactaccccttagttataattctgtgtcccctctgcatgcccttaaacattggacagtgaggtcacagtccacccaccctctctctgatctcccccttcctaagacttctcttttgcacatctagtgaggtgaaaatttggtctatgccaggcccatttcctgcttttgtgtaaggaaggtgctcacataggaagtttttatttggttagagacaggtttccctgtaggaagatgatggctcatttacactcagctgctctgcaagcagaaactttacaacctgatgtcatattccattttggactgggtgcggtgactcatgcctgtaatcccagtactctgggaagccaaggcaggcagatcacttgaggtcaggagttcgagaccagcctggccaatacggcaaaacctcatcattactaaaaacacaaaaattagccaggtgtggcggcgagcacctgtaatcccagctactcgggaggctgagacaggagaatctcttgaatccaggaggcagaggctgtggtgagccaagatgacacaactgcactccagcttgggcaacagggcgagaccttgtttaaaaaaaaaattcaatattggggttggaacatttcagttgccattgacagaacacccaattcaaattgactgaagcaaagaagggaatttattgcctctttcacattgaaacccaggagtggataacactggcttcaggcaaagcttgaatcaggactcaatctacaggccagcacctttctcttggccggatgtcctcagggctggcagatgcagtagactgcagtggacagtccccaccttgttactgctactacactttgctcctctggcccaaggcatgaggagagaggctgtgtcagaaactgaagctgttctcaggatcactgggctcttcttggcagaggggatgtctggcttgcctgaagggagtggctctgtaaggacgccttgatgctttcttcattaagattttgagcatttttacgtacttgagcttttttttttttttttttcaatttctagaggaactttttctctgttaattcctggaactgtattttgaatccttaaaggtgagccctcatagggagatccaaagtcctgtggttaacgccttcatttatagatgaggcagctgaggcctggggatgtgaacaacctgctcacagtcctcatttactggatttgacttcagccaggtgaactggaatgccttggggcgtggaagggcattaggagtgtttcatttgatatgtgaatgctcataaaaaaatgtcaaggaatgaagaacaacaactctcagtggtgcctgcatttataattatttatgtgaaagtcaaattcatgtacagtaaatttgttataagaat

SEQ ID NO: 9 - DNA, 5516 bp, Human
ccggccggaattccggctggatttcctcccggacatgacggtcgagggccgcctgctcgttcctgacagaattaacggcacagccaacaagatgaacggagctttggatcactcagaccaaccagacccagatgccattaagatgtttgtcggacagatcccccggtcatggtcggaaaaggagctgaaagaactttttgagccttacggagccgtctaccagatcaacgtcctccgggaccggagtcagaaccctccgcagagtaaaggttgttgtttcgtaacattttatacaagaaaagctgcacttgaggcccagaatgcactgcacaatattaaaactttacctgggatgcatcatcccattcagatgaaacctgcagatagtgaaaagtccaacgctgtggaagacagaaaattgttcataggaatggtttcgaagaaatgtaatgagaacgacatcagggtgatgttctctccatttggccagatagaagaatgccggatcctccggggacctgatgggctgagtcgaggctgtgcgtttgtcacattttctacaagggcaatggcacagaatgcaatcaaagccatgcatcagtctcagaccatggagggctgctcttcacctatcgtggtgaagtttgctgacactcagaaggacaaagagcaaaggcgcctccagcagcagctcgctcagcagatgcagcagctcaacactgccacctgggggaacctgacagggctgggcggactgaccccacagtatctggcgctcctgcagcaggccacctcctccagcaacctgggtgcgttcagcggcattcaacaaatggcaggcatgaatgctttacagttgcagaacctggcgacgctggctgctgctgcagctgcggcccagacctcagccaccagcaccaatgcaaaccctctctctaccacgagcagcgccctgggagccctcacgagtcccgtggctgcttcaacccccaactccactgctggtgcagccatgaactccttgacctctctcgggactctgcaaggactggctggagccactgttggactgaataatattaatgcactagcagttgctcaaatgctctcaggtatggcggctctgaatggaggacttggcgccacaggcttgacgaatggcacggctggcaccatggacgccctcacccaggcctactcaggaattcaacagtacgcagccgccgcgctgcccactctgtacagccagagcctgctgcagcagcagagcgctgcaggcagccagaaggaaggtccagagggggcaaacctctttatttaccaccttccacaggaatttggagaccagcacattctgcagatgttcatgccttttggaaatgttatctctgctaaagtcttcattgacaaacagaccaatctgagcaagtgctttggttttgttagctacgacaatccagtctctgcacaagctgctatccaagctatgaatggctttcagatcggcatgaaacgcttgaaggtgcagctgaagcgttccaaaaacgacagcaaaccttactgatcctaaccccagaggctccctgctctcattttagctttcttaggacatcttcatgcccgttagttcatcgtttgcctagcatgtccctgtggcgtctcaaaaaaaagtttcatcgtcccgtcattgtttctgatgtctttctgacctcacatcatatttggttctcctactgacctttgatctagtttgacctttgaaatttgcatgtgacctcatctagctatgaattctgggaagtcaatgtgaaaaacattgctgcattcatgcaagactgaaatttattattagacaaattcattatagaaaaaacctgtggcaaaaacgtttctttcttattttttttcttttcctaaaacagacttgaaagtattatacagggattggcattcttcccggtcactggtaacaatagcaatatgtgtccagggacacagaatgttggtttctaacagactacttccaaaaacagtttgagaaaaaaactgtctgattttaagtctctagaggtctgtaatagtttttacatttttcaggcagtgtaaagttttttgataaggccattttaggtggctcactttctcattaagatatatatatagaaccactttttgtagattagtataagaaaaatatttaccctgttttggggcaaatgctacctatttgtgtcaccttttgctgaactcacagttagacaatccatggtttaatgcacatgaaattacctatattttatactgtttcaatgtacaggagaaaggttactgtaaactgtgttatgttggtgcttctgtgaattaagttgtggtttcatcatgagtcttaatgttctttgttgataagacaagtttagaattggtttacttaatacaaaaaaaaaaaaaagaatttcaaaaaaaaaagttgtttgcttaaaaaaaatttcatgtgagggaaaaaaaaaaaaacctattccagaataagttttgtgttggcttgtgaagcattgatgtcattttttttaattgtggactatttagatgtgtttgtgttcagcaaaatgtgatctgtttttttcttttaaagaaaaaaagtgaaaatatatagtgccaaattccaaaggtacttccttcctagagcttcagtgtgtttcttgtgagaagtaatttgataacatgggtattttattatgtgttttgtataaatccctaatatttaaaaaaaaaaacaaaacaaaaaaaggttacaaagtttgttaacttgctatcctgtggtcttgttgcctgaaattgttattgtttgttatttctctctgatgttttttgtaagacattgtataagtgcccatgtcccacttttttaaccactccgcacatcagtgctgtgaaggcaacctcaccatgtattttcttcataatctatggaaacctctaaggtgagaaagttttgaacttttaaccctttctacccagagctatctggaatgttgatgactttttatactgtcatgatttgagtttgttttggggtgtttccaatttggatttttttccctgcatctatcctctaagttgtttcggtttgactactttgttctttggttaagatccaaaagaaaacagaaaacaattccacgaggccaatctaaagggaaaaaatcctacactacttttactacttttgattatttctcatttttgggaaaagaattcctaatgtgctactagaattccttcttcagttttaacgagtaattggataaaccctgagggaaaacggaggtagattcagcacctaacaatcctgtatgcttttgagatcacgtttagtgctatgtcctagtctagaatattttcatataccttgcagtaaaaccactttgtggcaggacagtctcttgaggggttttgtttctgtttcctaaatactcctaaataatatttctaatcagccattatgctggggcatctctgatcccagtaggtacctctgaatataccaggtgtctggagttagaagcccatagccctttcccagcctttttggtttttttaattgaacacatttcatctaagtaaagctcagttctttatcacaatttactgaccaaatacctagcaccagttcctgctgccactttttaaagtgccatatgactttctacgaacaggtaccttgctgtcttgacaaatcctaatgtcacgcctacagccccaacacaagctccagtcttcctcttcggcatgccctggaagcttcttggcctcagctccccttccccgctcagcaccctgttaggatcagtgtgtgtggatgggatagccctgggatggaaaggactagcctctactgatgcaaaaaaacaaaaagcaacacaaacgtttccttcttatagcacatgcacttccttacaatgacatgatttgtattatcctcacatgtgtttactactgctggggccttccttcatcctctgagggctattttgtactttctgcagcaatcagcttaataacaacacttattgcacctgtctctctctgagaacacggtgtgtctcgacacgtaccacgtaacgtggaaacacaagagcccaccacttgaatttctaagaccatttcattctgaaacttcttatcaattacctaaatctcaacgaaaaacaatttactgaagccgactcccctccccatctccctctcaacctcaacccacctgcatgcatctcccccagaggaaaacactgagggtaggggacagggaggctcaggacgcgccctctgaatcggagtgtttcttcttcacaagtcaccaagagaggacatgagggggaaagtccttttttgcccttctccaaaaaataaccttccacagagacaaactgtccttctatccacttttatcttttaataaatatcaaaaggaaaaagctgcaagggtgcaaagggcctgtgccagaagaaaacacacacagggaaaccgctttttttaatcaattgtagagaatagtcatttttaatctaaattagagaattgtgatacaatggcagtcctcaaaggcgtaacgagttcatctttctttcaccataggggttatagttggcttgtgctactctggaatcattttactgtttgtttttattatcttaagtgctaattaaaaaaaaaataaaattttaaaaaaacctgtagtttcattacctttttgaataatgtcatacaaaaaatgtatttgtttttttgtgctgtgagaattgatgtttgtagattaataatcattttgtttagaattacaaaatagtttttaaatattgtctgagaaaagccaaagttaatgcaacctagtggaaactgtaagaccatttgagtattgtttgttttattgatgcatttggattttgttgtttgatggaatttgagccaaaaaaaaaaatacgcaggctttcctatttctacaactgattgtacttatgcattttgtaccagtggaactttttatactggagattaaaaaaaaaatggaaatttttgtggcttgctctggtgggcccctgacaatgactgatttcaagtttgatttcgggttgattgattgattgattgatagaaagaaagttgcttttcttttgagaattaaaaactttggcttgatttcttttttccctttgcttatatctagcattagaattttgtcttaaaataacagcggtaagtttcactttttattctgtattgtgcagttacacaataaggtaattagatttagaagtactcagtcactttaagtggataaatgtattagttaaaactttagggtttgcttttttgctgtttagatcaaagttttttctgattcttctgtcctcattgtgaacataaccgtgtagttgaaacagtcaaacttatttttgtaatgtatgttattgtgtgatgcagtttttttgcttctgtctccaatattaaaccattttcc

SEQ ID NO: 10 - DNA, 736 bp, Human
ggctctcaccctcctctcctgcagctccagctttgtgctctgcctctgaggagaccatggcccggcctctgtgtaccctgctactcctgatggctaccctggctggggctctggcctcgagctccaaggaggagaataggataatcccaggtggcatctatgatgcagacctcaatgatgagtgggtacagcgtgcccttcacttcgccatcagcgagtacaacaaggccaccgaagatgagtactacagacgcccgctgcaggtgctgcgagccagggagcagacctttgggggggtgaattacttcttcgacgtagaggtgggccgcaccatatgtaccaagtcccagcccaacttggacacctgtgccttccatgaacagccagaactgcagaagaaacagttgtgctctttcgagatctacgaagttccctgggaggacagaatgtccctggtgaattccaggtgtcaagaagcctaggggtctgtgccaggccagtcacaccgaccaccacccactcccacccactgtagtgctcccacccctggactggtggcccccaccctgcgggaggcctccccatgtgcctgtgccaagagacagacagagaaggctgcaggagtcctttgttgctcagcagggcgctctgccctccctccttccttcttgcttctaatagacctggtacatggtacacacacccccacctcctgcaattaaacagtagcatcgcc

SEQ ID NO: 11 - DNA, 6129 bp, Human
aattggaagcaaatgacatcacagcaggtcagagaaaaagggttgagcggcaggcacccagagtagtaggtctttggcattaggagcttgagcccagacggccctagcagggaccccagcgcccgagagaccatgcagaggtcgcctctggaaaaggccagcgttgtctccaaactttttttcagctggaccagaccaattttgaggaaaggatacagacagcgcctggaattgtcagacatataccaaatcccttctgttgattctgctgacaatctatctgaaaaattggaaagagaatgggatagagagctggcttcaaagaaaaatcctaaactcattaatgcccttcggcgatgttttttctggagatttatgttctatggaatctttttatatttaggggaagtcaccaaagcagtacagcctctcttactgggaagaatcatagcttcctatgacccggataacaaggaggaacgctctatcgcgatttatctaggcataggcttatgccttctctttattgtgaggacactgctcctacacccagccatttttggccttcatcacattggaatgcagatgagaatagctatgtttagtttgatttataagaagactttaaagctgtcaagccgtgttctagataaaataagtattggacaacttgttagtctcctttccaacaacctgaacaaatttgatgaaggacttgcattggcacatttcgtgtggatcgctcctttgcaagtggcactcctcatggggctaatctgggagttgttacaggcgtctgccttctgtggacttggtttcctgatagtccttgccctttttcaggctgggctagggagaatgatgatgaagtacagagatcagagagctgggaagatcagtgaaagacttgtgattacctcagaaatgattgaaaatatccaatctgttaaggcatactgctgggaagaagcaatggaaaaaatgattgaaaacttaagacaaacagaactgaaactgactcggaaggcagcctatgtgagatacttcaatagctcagccttcttcttctcagggttctttgtggtgtttttatctgtgcttccctatgcactaatcaaaggaatcatcctccggaaaatattcaccaccatctcattctgcattgttctgcgcatggcggtcactcggcaatttccctgggctgtacaaacatggtatgactctcttggagcaataaacaaaatacaggatttcttacaaaagcaagaatataagacattggaatataacttaacgactacagaagtagtgatggagaatgtaacagccttctgggaggagggatttggggaattatttgagaaagcaaaacaaaacaataacaatagaaaaacttctaatggtgatgacagcctcttcttcagtaatttctcacttcttggtactcctgtcctgaaagatattaatttcaagatagaaagaggacagttgttggcggttgctggatccactggagcaggcaagacttcacttctaatgatgattatgggagaactggagccttcagagggtaaaattaagcacagtggaagaatttcattctgttctcagttttcctggattatgcctggcaccattaaagaaaatatcatctttggtgtttcctatgatgaatatagatacagaagcgtcatcaaagcatgccaactagaagaggacatctccaagtttgcagagaaagacaatatagttcttggagaaggtggaatcacactgagtggaggtcaacgagcaagaatttctttagcaagagcagtatacaaagatgctgatttgtatttattagactctccttttggatacctagatgttttaacagaaaaagaaatatttgaaagctgtgtctgtaaactgatggctaacaaaactaggattttggtcacttctaaaatggaacatttaaagaaagctgacaaaatattaattttgaatgaaggtagcagctatttttatgggacattttcagaactccaaaatctacagccagactttagctcaaaactcatgggatgtgattctttcgaccaatttagtgcagaaagaagaaattcaatcctaactgagaccttacaccgtttctcattagaaggagatgctcctgtctcctggacagaaacaaaaaaacaatcttttaaacagactggagagtttggggaaaaaaggaagaattctattctcaatccaatcaactctatacgaaaattttccattgtgcaaaagactcccttacaaatgaatggcatcgaagaggattctgatgagcctttagagagaaggctgtccttagtaccagattctgagcagggagaggcgatactgcctcgcatcagcgtgatcagcactggccccacgcttcaggcacgaaggaggcagtctgtcctgaacctgatgacacactcagttaaccaaggtcagaacattcaccgaaagacaacagcatccacacgaaaagtgtcactggcccctcaggcaaacttgactgaactggatatatattcaagaaggttatctcaagaaactggcttggaaataagtgaagaaattaacgaagaagacttaaaggagtgcctttttgatgatatggagagcataccagcagtgactacatggaacacataccttcgatatattactgtccacaagagcttaatttttgtgctaatttggtgcttagtaatttttctggcagaggtggctgcttctttggttgtgctgtggctccttggaaacactcctcttcaagacaaagggaatagtactcatagtagaaataacagctatgcagtgattatcaccagcaccagttcgtattatgtgttttacatttacgtgggagtagccgacactttgcttgctatgggattcttcagaggtctaccactggtgcatactctaatcacagtgtcgaaaattttacaccacaaaatgttacattctgttcttcaagcacctatgtcaaccctcaacacgttgaaagcaggtgggattcttaatagattctccaaagatatagcaattttggatgaccttctgcctcttaccatatttgacttcatccagttgttattaattgtgattggagctatagcagttgtcgcagttttacaaccctacatctttgttgcaacagtgccagtgatagtggcttttattatgttgagagcatatttcctccaaacctcacagcaactcaaacaactggaatctgaaggcaggagtccaattttcactcatcttgttacaagcttaaaaggactatggacacttcgtgccttcggacggcagccttactttgaaactctgttccacaaagctctgaatttacatactgccaactggttcttgtacctgtcaacactgcgctggttccaaatgagaatagaaatgatttttgtcatcttcttcattgctgttaccttcatttccattttaacaacaggagaaggagaaggaagagttggtattatcctgactttagccatgaatatcatgagtacattgcagtgggctgtaaactccagcatagatgtggatagcttgatgcgatctgtgagccgagtctttaagttcattgacatgccaacagaaggtaaacctaccaagtcaaccaaaccatacaagaatggccaactctcgaaagttatgattattgagaattcacacgtgaagaaagatgacatctggccctcagggggccaaatgactgtcaaagatctcacagcaaaatacacagaaggtggaaatgccatattagagaacatttccttctcaataagtcctggccagagggtgggcctcttgggaagaactggatcagggaagagtactttgttatcagcttttttgagactactgaacactgaaggagaaatccagatcgatggtgtgtcttgggattcaataactttgcaacagtggaggaaagcctttggagtgataccacagaaagtatttattttttctggaacatttagaaaaaacttggatccctatgaacagtggagtgatcaagaaatatggaaagttgcagatgaggttgggctcagatctgtgatagaacagtttcctgggaagcttgactttgtccttgtggatgggggctgtgtcctaagccatggccacaagcagttgatgtgcttggctagatctgttctcagtaaggcgaagatcttgctgcttgatgaacccagtgctcatttggatccagtaacataccaaataattagaagaactctaaaacaagcatttgctgattgcacagtaattctctgtgaacacaggatagaagcaatgctggaatgccaacaatttttggtcatagaagagaacaaagtgcggcagtacgattccatccagaaactgctgaacgagaggagcctcttccggcaagccatcagcccctccgacagggtgaagctctttccccaccggaactcaagcaagtgcaagtctaagccccagattgctgctctgaaagaggagacagaagaagaggtgcaagatacaaggctttagagagcagcataaatgttgacatgggacatttgctcatggaattggagctcgtgggacagtcacctcatggaattggagctcgtggaacagttacctctgcctcagaaaacaaggatgaattaagtttttttttaaaaaagaaacatttggtaaggggaattgaggacactgatatgggtcttgataaatggcttcctggcaatagtcaaattgtgtgaaaggtacttcaaatccttgaagatttaccacttgtgttttgcaagccagattttcctgaaaacccttgccatgtgctagtaattggaaaggcagctctaaatgtcaatcagcctagttgatcagcttattgtctagtgaaactcgttaatttgtagtgttggagaagaactgaaatcatacttcttagggttatgattaagtaatgataactggaaacttcagcggtttatataagcttgtattcctttttctctcctctccccatgatgtttagaaacacaactatattgtttgctaagcattccaactatctcatttccaagcaagtattagaataccacaggaaccacaagactgcacatcaaaatatgccccattcaacatctagtgagcagtcaggaaagagaacttccagatcctggaaatcagggttagtattgtccaggtctaccaaaaatctcaatatttcagataatcacaatacatcccttacctgggaaagggctgttataatctttcacaggggacaggatggttcccttgatgaagaagttgatatgccttttcccaactccagaaagtgacaagctcacagacctttgaactagagtttagctggaaaagtatgttagtgcaaattgtcacaggacagcccttctttccacagaagctccaggtagagggtgtgtaagtagataggccatgggcactgtgggtagacacacatgaagtccaagcatttagatgtataggttgatggtggtatgttttcaggctagatgtatgtacttcatgctgtctacactaagagagaatgagagacacactgaagaagcaccaatcatgaattagttttatatgcttctgttttataattttgtgaagcaaaattttttctctaggaaatatttattttaataatgtttcaaacatatattacaatgctgtattttaaaagaatgattatgaattacatttgtataaaataatttttatatttgaaatattgactttttatggcactagtatttttatgaaatattatgttaaaactgggacaggggagaacctagggtgatattaaccaggggccatgaatcaccttttggtctggagggaagccttggggctgatcgagttgttgcccacagctgtatgattcccagccagacacagcctcttagatgcagttctgaagaagatggtaccaccagtctgactgtttccatcaagggtacactgccttctcaactccaaactgactcttaagaagactgcattatatttattactgtaagaaaatatcacttgtcaataaaatccatacatttgtgt

SEQ ID NO: 12 - DNA, 1876 bp, Human
gagccatgctcgcggcgatgggctctctggcggctgccctctgggcagtggtccatcctcggactctcctactgggcactgtcgcctttctgctcgctgctgactttctcaaaagacggcgcccaaagaactacccgccggggccctggcgcctgcccttccttggcaacttcttccttgtggacttcgagcagtcgcacctggaggttcagctgtttgtgaagaaatatgggaacctttttagcttggagcttggtgacatatctgcagttcttattactggcttgcccttaatcaaagaagcccttatccacatggaccaaaactttgggaaccgccccgtgacccctatgcgagaacatatctttaagaaaaatggattgattatgtcaagtggccaggcatggaaggagcaaagaaggttcactctgacagcactaaggaactttggtttaggaaagaagagcttagaggaacgcattcaggaggaggcccaacacctcactgaagcaataaaagaggagaacggacagccttttgaccctcatttcaagatcaacaatgcagtttccaatatcatttgctccatcaccttcggagaacgctttgagtaccaggatagttggtttcagcagctgctgaagttactagatgaagtcacatacttggaggcttcaaagacatgccagctctacaatgtctttccatggataatgaaattcctgcctggaccccaccaaactctcttcagcaactggaaaaaactgaaattgtttgtttctcatatgattgacaaacacagaaaggattggaatcctgcagaaacaagagactttattgatgcttaccttaaagaaatgtcaaagcacacaggcaatcctacttcaagtttccatgaagaaaacctcatctgcagcaccctggacctcttctttgccggaaccgagacaacttccacaactctgcgatgggctctgctttatatggccctctacccagaaatccaagaaaaagtacaagctgagattgacagagtgattggccaggggcagcagccgagcacagccgcccgggagtccatgccctacaccaatgctgtcatccatgaggtgcagagaatgggcaacatcatccccctgaacgttcccagggaagtgacagttgataccactttggctgggtaccacctgcccaagggtaccatgatcctgaccaatttgacggcgctgcacagggaccccacagagtgggccacccctgacacattcaatccggaccattttctggagaatggacagtttaagaaaagggaagcctttatgcctttctcaataggaaagcgggcatgcctcggagaacagttggccaggactgagctgtttattttcttcacttcccttatgcaaaaatttaccttcaggcccccaaacaatgagaagctgagcctgaagtttagaatgggtatcaccatttccccagtcagtcaccgcctctgcgctgttcctcaggtgtaatattgttaagaaagaaaggggcaaggaaagtaagaagacatggcacgtgttctgaaaccactggtgtctgctcagatgtgttgggacaaaatgaaagtgactttcaagaaagatcagaggaatttgactcagagaaaactagatccaaatcccagctctactgtctcgtccgaattagccttgggaaaatcatttatatgctaaataatttacctttttatctaggagatgaaaagaggataatgtttccttccataaagaaagttcttgtaagaatcaaaagaaatggtgagctttaagtggtttgtaaaccataaaacacatcataaaagttctatctataaaaaaaaaaaaaaaaaaaa

SEQ ID NO: 13 - DNA, 2375 bp, Human
atgaagacaccgtggagggttctcctgggactgctgggtgctgctgcgcttgtcaccatcatcaccgtgcccgtggttctgctgaacaaaggcacagatgatgctacagctgacagtcgcaaaacttacactctaactgattacttaaaaaatacttatagactgaagttatactccttaagatggatttcagatcatgaatatctctacaaacaagaaaataatatcttggtattcaatgctgaatatggaaacagctcagttttcttggagaacagtacatttgatgagtttggacattctatcaatgattattcaatatctcctgatgggcagtttattctcttagaatacaactacgtgaagcaatggaggcattcctacacagcttcatatgacatttatgatttaaataaaaggcagctgattacagaagagaggattccaaacaacacacagtgggtcacatggtcaccagtgggtcataaattggcatatgtttggaacaatgacatttatgttaaaattgaaccaaatttaccaagttacagaatcacatggacggggaaagaagatataatatataatggaataactgactgggtttatgaagaggaagtcttcagtgcctactctgctctgtggtggtctccaaacggcacttttttagcatatgcccaatttaacgacacagaagtcccacttattgaatactccttctactctgatgagtcactgcagtacccaaagactgtacgggttccatatccaaaggcaggagctgtgaatccaactgtaaagttctttgttgtaaatacagactctctcagctcagtcaccaatgcaacttccatacaaatcactgctcctgcttctatgttgataggggatcactacttgtgtgatgtgacatgggcaacacaagaaagaatttctttgcagtggctcaggaggattcagaactattcggtcatggatatttgtgactatgatgaatccagtggaagatggaactgcttagtggcacggcaacacattgaaatgagtactactggctgggttggaagatttaggccttcagaacctcattttacccttgatggtaatagcttctacaagatcatcagcaatgaagaaggttacagacacatttgctatttccaaatagataaaaaagactgcacatttattacaaaaggcacctgggaagtcatcgggatagaagctctaaccagtgattatctatactacattagtaatgaatataaaggaatgccaggaggaaggaatctttataaaatccaacttagtgactatacaaaagtgacatgcctcagttgtgagctgaatccggaaaggtgtcagtactattctgtgtcattcagtaaagaggcgaagtattatcagctgagatgttccggtcctggtctgcccctctatactctacacagcagcgtgaatgataaagggctgagagtcctggaagacaattcagctttggataaaatgctgcagaatgtccagatgccctccaaaaaattggacttcattattttgaatgaaacaaaattttggtatcagatgatcttgcctcctcattttgataaatccaagaaatatcctctactattagatgtgtatgcaggcccatgtagtcaaaaagcagacattgtcttcagactgaactgggccacttaccttgcaagcacagaaaacattatagtagctagctttgatggcagaggaagtggttaccaaggagataagatcatgcatgcaatcaacagaagactgggaacatttgaagttgaagatcaaattgaagcagccagacaattttcaaaaatgggatttgtggacaacaaacgaattgcaatttggggctggtcatatggagggtacgtaacctcaatggtcctgggatcgggaagtggcgtgttcaagtgtggaatagccgtggcgcctgtatcccggtgggagtactatgagtcagtgtacacagaacgttacatgggtctcccaactccagaagacaaccttgaccattacagaaattcaacagtcatgagcagagctgaaaattttaaacaagttgagtacctccttattcatggaacagcagatgataacgttcactttcagcagtcagctcagatctccaaagccctggtcgatgttggagtggatttccaggcaatgtggtatactgatgaagaccatggaatagctagcagcacagcacaccaacatatatatacccacatgagccacttcataaaacaatgtttctctttaccttagcacctcaaaatactatgccatttaaagcttattaaaactcatttttgttttcattatctcaaaaaaaaaaaaaa

SEQ ID NO: 14 - DNA, 2248 bp, Human
cccagcgccccggaagtgatctgtggcggctgctgcagagccgccaggaggagggtggatctccccagagcaaagcgtcggagtcctcctcctccttctcctcctcctcctcctcctcctccagccgcccaggctcccccgccacccgtcagactcctccttcgaccgctcccggcgcggggccttccaggcgacaaggaccgagtaccctccggccggagccacgcagccgcggcttccggagccctcggggcggcggactggctcgcggtgcaggtaaagctccagatggctctggaacttatgaggaaagagttggaggacgccttgactcaggaggccaacgtggggaaaaagactgtcatttggaaggagaaagtggaaatgcagaggcagcgcttcagattggagtttgagaagcatcgtggctttctggcccaggaggagcaacggcagctgaggcggctggaggcggaggagcgagcgacgctgcagagactgcgggagagcaagagccggctggtccagcagagcaaggccctgaaggagctggcggatgagctgcaggagaggtgccagcgcccagccctgggtctgctggagggtgtgagaggagtcctgagcagaagtaaggctgtcacaaggctggaagcagagaacatccccatggaactgaagacagcatgctgcatccctgggaggagggagctcttaaggaagttccaagtggatgtaaagctggatcccgccacggcgcacccgagtctgctcttgaccgccgacctgcgcagtgtgcaggatggagaaccatggagggatgtccccaacaaccctgagcgatttgacacatggccctgcatcctgggtttgcagagcttctcatcagggaggcattactgggaggttctggtgggagaaggagcagagtggggtttaggggtctgtcaagacacactgccaagaaagggggaaaccatgccatctcctgagaatggggtctgggccctgtggctgctgaaagggaatgagtacatggtccttgcctccccatcagtgcctcttctccaactggaaagtcctcgctgcattgggattttcttggactatgaagccggtgaaatttcattctacaatgtcacagatggatcttatatctacacattcaaccaactcttctctggtcttcttcggccttactttttcatctgtgatgcaactcctcttatcttgccacccacgacaatagcagggtcaggaaattgggcatccagggatcatttagatcctgcttctgatgtaagagatgatcatctctaaaattctgttcccaagatgcagtcctagcgtagcgaacgttcctggagtggggtgaaggatatcaatatactaagttttaacagataccccatttaggtcagcacttgattcgttgttgctgtgaaatatgtccatgggacaaaagagggaatatgaaatatttgcatatgggaagattatagagcataataattttgtaaatggagcaatctcaacctctatttctagatcacattttcttgatgtcttccttcaaattaatgaccttggattacataaggatttctatgcattcattataatttgttattcctttcaatatccttgtatttcaaatcttccatataagaattagacatggcaattcttaaattgattcagaatggtctgatactattccagtatcacctccttaattctgtttctcctcgttttcctgattttccttctcattctctccttccccgctctgtctctctctccctgtcactctctctctctcgttccttattttttgtttcttacctcttactgtttaacctgttgcttccttctggattaatacatttagagccattcctttatatggtcacatttcctatgactttactcaattacttttaaaatcctttctattctgagactaatttttaagaattacaaagctcattcttctgaatctaatatcactaactcctagactttttccgttttctttggatacactttaagtaggaatttatcagaattttcattcaactcgttctttaatgcagatatttactggttataagaccttaaggctgggtgcagtggctcacgcctgtggtcccagcgctttggggggctgaggcgggtggatcacaggctcgggagttcggggccagcctggccagcatggtgaaaccctgtctctactagaaaaaaaaaa

SEQ ID NO: 15 - DNA, 330 bp, Human
gcggccgcaggtacccgggctccacgtcagggtagacctggcgtccctcaatgccttccatgtagttggccacgtaatccaccatctccttccctctccttcggaattcacttgcgttcatggtgtctgggctctgtcagaggtgaaaaatgctggaaattcgaattccttacagggctactctccttgatgggattctccaactttggggactgaagagcatgtggagaagctgctgaggcactcggcactgagacagtcactcttcttgaaactccaagccacacgtttccctcttcttgcatttccagccacatgtgcccctcgtgc

SEQ ID NO: 16 - DNA, 3370 bp, Human
gcccccgcccggcccgccccgctctcctagtcccttgcaacctggcgctgcatccgggccactgtcccaggtcccaggtcccggcccggagctatggagcggcgctggcccctggggctagggctggtgctgctgctctgcgccccgctgcccccgggggcgcgcgccaaggaagttactctgatggacacaagcaaggcacagggagagctgggctggctgctggatcccccaaaagatgggtggagtgaacagcaacagatactgaatgggacacccctctacatgtaccaggactgcccaatgcaaggacgcagagacactgaccactggcttcgctccaattggatctaccgcggggaggaggcttcccgcgtccacgtggagctgcagttcaccgtgcgggactgcaagagtttccctgggggagccgggcctctgggctgcaaggagaccttcaaccttctgtacatggagagtgaccaggatgtgggcattcagctccgacggcccttgttccagaaggtaaccacggtggctgcagaccagagcttcaccattcgagaccttgcgtctggctccgtgaagctgaatgtggagcgctgctctctgggccgcctgacccgccgtggcctctacctcgctttccacaacccgggtgcctgtgtggccctggtgtctgtccgggtcttctaccagcgctgtcctgagaccctgaatggcttggcccaattcccagacactctgcctggccccgctgggttggtggaagtggcgggcacctgcttgccccacgcgcgggccagccccaggccctcaggtgcaccccgcatgcactgcagccctgatggcgagtggctggtgcctgtaggacggtgccactgtgagcctggctatgaggaaggtggcagtggcgaagcatgtgttgcctgccctagcggctcctaccggatggacatggacacaccccattgtctcacgtgcccccagcagagcactgctgagtctgagggggccaccatctgtacctgtgagagcggccattacagagctcccggggagggcccccaggtggcatgcacaggtcccccctcggccccccgaaacctgagcttctctgcctcagggactcagctctccctgcgttgggaacccccagcagatacggggggacgccaggatgtcagatacagtgtgaggtgttcccagtgtcagggcacagcacaggacggggggccctgccagccctgtggggtgggcgtgcacttctcgccgggggcccgggcgctcaccacacctgcagtgcatgtcaatggccttgaaccttatgccaactacacctttaatgtggaagcccaaaatggagtgtcagggctgggcagctctggccatgccagcacctcagtcagcatcagcatggggcatgcagagtcactgtcaggcctgtctctgagactggtgaagaaagaaccgaggcaactagagctgacctgggcggggtcccggccccgaagccctggggcgaacctgacctatgagctgcacgtgctgaaccaggatgaagaacggtaccagatggttctagaacccagggtcttgctgacagagctgcagcctgacaccacatacatcgtcagagtccgaatgctgaccccactgggtcctggccctttctcccctgatcatgagtttcggaccagcccaccagtgtccaggggcctgactggaggagagattgtagccgtcatctttgggctgctgcttggtgcagccttgctgcttgggattctcgttttccggtccaggagagcccagcggcagaggcagcagaggcacgtgaccgcgccaccgatgtggatcgagaggacaagctgtgctgaagccttatgtggtacctccaggcatacgaggaccctgcacagggagccttggactttacccggaggctggtctaattttccttcccgggagcttgatccagcgtggctgatggtggacactgtcataggagaaggagagtttggggaagtgtatcgagggaccctcaggctccccagccaggactgcaagactgtggccattaagaccttaaaagacacatccccaggtggccagtggtggaacttccttcgagaggcaactatcatgggccagtttagccacccgcatattctgcatctggaaggcgtcgtcacaaagcgaaagccgatcatgatcatcacagaatttatggagaatgcagccctggatgccttcctgagggagcgggaggaccagctggtccctgggcagctagtggccatgctgcagggcatagcatctggcatgaactacctcagtaatcacaattatgtccaccgggacctggctgccagaaacatcttggtgaatcaaaacctgtgctgcaaggtgtctgactttggcctgactcgcctcctggatgactttgatggcacatacgaaacccagggaggaaagatccctatccgttggacagcccctgaagccattgcccatcggatcttcaccacagccagcgatgtgtggagctttgggattgtgatgtgggaggtgctgagctttggggacaagccttatggggagatgagcaatcaggaggttatgaagagcattgaggatgggtaccggttgccccctcctgtggactgccctgcccctctgtatgagctcatgaagaactgctgggcatatgaccgtgcccgccggccacacttccagaagcttcaggcacatctggagcaactgcttgccaacccccactccctgcggaccattgccaactttgaccccagggtgactcttcgcctgcccagcctgagtggctcagatgggatcccgtatcgaaccgtctctgagtggctcgagtccatacgcatgaaacgctacatcctgcacttccactcggctgggctggacaccatggagtgtgtgctggagctgaccgctgaggacctgacgcagatgggaatcacactgcccgggcaccagaagcgcattctttgcagtattcagggattcaaggactgatccctcctctcaccccatgcccaatcagggtgcaaggagcaaggacggggccaaggtcgctcatggtcactccctgcgccccttcccacaacctgccagactaggctatcggtgctgcttctgcccgctttaaggagaaccctgctctgcaccccagaaaacctctttgttttaaaagggaggtgggggtagaagtaaaaggatgatcatgggagggagctcaggggttaatatatatacatacatacacatatatatattgttgtaaataaacaggaaatgattttctgcctccatcccacccatcagggctgcaggcact

SEQ ID NO: 17 - DNA, 386 bp, Human
  misc_feature (155)..(155): n is a, c, g, or t
  misc_feature (266)..(266): n is a, c, g, or t
  misc_feature (280)..(280): n is a, c, g, or t
  misc_feature (295)..(295): n is a, c, g, or t
  misc_feature (304)..(304): n is a, c, g, or t
  misc_feature (330)..(330): n is a, c, g, or t
  misc_feature (354)..(354): n is a, c, g, or t
  misc_feature (375)..(375): n is a, c, g, or t
gggaataagcttgcgaccgcttaattaaagatctttttttttttttttttttttttttaagattcaagtcaaaattgttttattgtcactcacatatttaacataaaaagaaatgcagcaaatggctcagtatcgtattgaaaaaaaatccaggntgtgcagcttgttctattaacatctgggagaagagctgttcccacatcaggtcacagcagctgcagttctccaacgtccctttgcagtacacagccgtgggcacacttggncacagcccacgggncagacaggtagcagncagctcttnctttgcagggagggtgcatttgcctnctttgcacttgcagggagccggtncaggttttagggagacacccnttgggtccagg

SEQ ID NO: 18 - DNA, 448 bp, Human
tttgaattggatattttttaatgcaaattgttgtttttcttcatttgtctactttattaagctgtcctcaggccccaagaaacatactgtcccctcatttagaaacagactaactccgttttcctccactatcccctcccctgtccttgatctgtagatcctgttaagacaggaaaaacagtgttggtcaaagggtacacgctttcagttacaagatgaacaagttctgaatacgtaagatagaacatgggaggtgatgtggccgggtgcagtgactcacgcctgtaatcccagcactttgggaggccgaggtgggcggatcatgaggtcaagggatcgagatcatcctggccaacatggtgaaaccccgtctctactaaaaatacaaaaattagctgggcatggtggcacacgcctatagtcccagctacttaggaggctgaggcaa

SEQ ID NO: 19 - DNA, 4574 bp, Human
gagcgggcgagggagcgcgcgcggccgccacaaagctcgggcgccgcggggctgcatgcggcgtacctggcccggcgcggcgactgctctccgggctggcgggggccggccgcgagccccgggggccccgaggccgcagcttgcctgcgcgctctgagccttcgcaactcgcgagcaaagtttggtggaggcaacgccaagcctgagtcctttcttcctctcgttccccaaatccgaggcagcccgcgggcgtcatgcccgcgctcctccgcagcctggggtacgcgctgaagcccgggaggcttggcgccggcgaagacccaaggaccactcttctgcgtttggagttgctccccacaaccccgggctcgtcgctttctccatcccgacccagccggggcgcggggacaacacaggtcgcggaggagcgttgccattcaagtgactgcagcagcagcggcagcgcctcggttcctgagcccaccgcaggctgaaggcattgcgcgtagtccatgcccgtagaggaagtgtgcagatgggattaacgtccacatggagatatggaagaggaccggggattggtaccgtaaccatggtcagctggggtcgtttcatctgcctggtcgtggtcaccatggcaaccttgtccctggcccggccctccttcagtttagttgaggataccacattagagccagaagagccaccaaccaaataccaaatctctcaaccagaagtgtacgtggctgcgccaggggagtcgctagaggtgcgctgcctgttgaaagatgccgccgtgatcagttggactaaggatggggtgcacttggggcccaacaataggacagtgcttattggggagtacttgcagataaagggcgccacgcctagagactccggcctctatgcttgtactgccagtaggactgtagacagtgaaacttggtacttcatggtgaatgtcacagatgccatctcatccggagatgatgaggatgacaccgatggtgcggaagattttgtcagtgagaacagtaacaacaagagagcaccatactggaccaacacagaaaagatggaaaagcggctccatgctgtgcctgcggccaacactgtcaagtttcgctgcccagccggggggaacccaatgccaaccatgcggtggctgaaaaacgggaaggagtttaagcaggagcatcgcattggaggctacaaggtacgaaaccagcactggagcctcattatggaaagtgtggtcccatctgacaagggaaattatacctgtgtggtggagaatgaatacgggtccatcaatcacacgtaccacctggatgttgtggagcgatcgcctcaccggcccatcctccaagccggactgccggcaaatgcctccacagtggtcggaggagacgtagagtttgtctgcaaggtttacagtgatgcccagccccacatccagtggatcaagcacgtggaaaagaacggcagtaaatacgggcccgacgggctgccctacctcaaggttctcaagcactcggggataaatagttccaatgcagaagtgctggctctgttcaatgtgaccgaggcggatgctggggaatatatatgtaaggtctccaattatatagggcaggccaaccagtctgcctggctcactgtcctgccaaaacagcaagcgcctggaagagaaaaggagattacagcttccccagactacctggagatagccatttactgcataggggtcttcttaatcgcctgtatggtggtaacagtcatcctgtgccgaatgaagaacacgaccaagaagccagacttcagcagccagccggctgtgcacaagctgaccaaacgtatccccctgcggagacaggtaacagtttcggctgagtccagctcctccatgaactccaacaccccgctggtgaggataacaacacgcctctcttcaacggcagacacccccatgctggcaggggtctccgagtatgaacttccagaggacccaaaatgggagtttccaagagataagctgacactgggcaagcccctgggagaaggttgctttgggcaagtggtcatggcggaagcagtgggaattgacaaagacaagcccaaggaggcggtcaccgtggccgtgaagatgttgaaagatgatgccacagagaaagacctttctgatctggtgtcagagatggagatgatgaagatgattgggaaacacaagaatatcataaatcttcttggagcctgcacacaggatgggcctctctatgtcatagttgagtatgcctctaaaggcaacctccgagaatacctccgagcccggaggccacccgggatggagtactcctatgacattaaccgtgttcctgaggagcagatgaccttcaaggacttggtgtcatgcacctaccagctggccagaggcatggagtacttggcttcccaaaaatgtattcatcgagatttagcagccagaaatgttttggtaacagaaaacaatgtgatgaaaatagcagactttggactcgccagagatatcaacaatatagactattacaaaaagaccaccaatgggcggcttccagtcaagtggatggctccagaagccctgtttgatagagtatacactcatcagagtgatgtctggtccttcggggtgttaatgtgggagatcttcactttagggggctcgccctacccagggattcccgtggaggaactttttaagctgctgaaggaaggacacagaatggataagccagccaactgcaccaacgaactgtacatgatgatgagggactgttggcatgcagtgccctcccagagaccaacgttcaagcagttggtagaagacttggatcgaattctcactctcacaaccaatgaggaatacttggacctcagccaacctctcgaacagtattcacctagttaccctgacacaagaagttcttgttcttcaggagatgattctgttttttctccagaccccatgccttacgaaccatgccttcctcagtatccacacataaacggcagtgttaaaacatgaatgactgtgtctgcctgtccccaaacaggacagcactgggaacctagctacactgagcagggagaccatgcctcccagagcttgttgtctccacttgtatatatggatcagaggagtaaataattggaaaagtaatcagcatatgtgtaaagatttatacagttgaaaacttgtaatcttccccaggaggagaagaaggtttctggagcagtggactgccacaagccaccatgtaacccctctcacctgccgtgcgtactggctgtggaccagtaggactcaaggtggacgtgcgttctgccttccttgttaattttgtaataattggagaagatttatgtcagcacacacttacagagcacaaatgcagtatataggtgctggatgtatgtaaatatattcaaattatgtataaatatatattatatatttacaaggagttattttttgtattgattttaaatggatgtcccaatgcacctagaaaattggtctctctttttttaatagctatttgctaaatgctgttcttacacataatttcttaattttcaccgagcagaggtggaaaaatacttttgctttcagggaaaatggtataacgttaatttattaataaattggtaatatacaaaacaattaatcatttatagttttttttgtaatttaagtggcatttctatgcaggcagcacagcagactagttaatctattgcttggacttaactagttatcagatcctttgaaaagagaatatttacaatatatgactaatttggggaaaatgaagttttgatttatttgtgtttaaatgctgctgtcagacgattgttcttagacctcctaaatgccccatattaaaagaactcattcataggaaggtgtttcattttggtgtgcaaccctgtcattacgtcaacgcaacgtctaactggacttcccaagataaatggtaccagcgtcctcttaaaagatgccttaatccattccttgaggacagaccttagttgaaatgatagcagaatgtgcttctctctggcagctggccttctgcttctgagttgcacattaatcagattagcctgattctcttcagtgaattttgataatggcttccagactctttgcgttggagacgcctgttaggatcttcaagtcccatcatagaaaattgaaacacagagttgttctgctgatagttttggggatacgtccatctttttaagggattgctttcatctaattctggcaggacctcaccaaaagatccagcctcatacctacatcagacaaaatatcgccgttgttccttctgtactaaagtattgtgttttgctttggaaacacccactcactttgcaatagccgtgcaagatgaatgcagattacactgatcttatgtgttacaaaattggagaaagtatttaataaaacctgttaatttttatactgacaataaaaatgtttctacagatattaatgttaacaagacaaaataaatgtcacgcaactt

SEQ ID NO: 20 - DNA, 546 bp, Human
gatttctcccggaacctctgctcagcctggtgaaccacacaggccagcgctctgacatgcagaaggtgaccctgggcctgcttgtgttcctggcaggctttcctgtcctggacgccaatgacctagaagataaaaacagtcctttctactatgactggcacagcctccaggttggcgggctcatctgcgctggggttctgtgcgccatgggcatcatcatcgtcatgagtgcaaaatgcaaatgcaagtttggccagaagtccggtcaccatccaggggagactccacctctcatcaccccaggctcagcccaaagctgatgaggacagaccagctgaaattgggtggaggaccgttctctgtccccaggtcctgtctctgcacagaaacttgaactccaggatggaattcttcctcctctgctgggactcctttgcatggcagggcctcatctcacctctcgcaagagggtctctttgttcaattttttttaatctaaaatgattgtgcctctccaaaaaaaaaaaaaaaaaaaaaaaaaaaaaa

SEQ ID NO: 21 - DNA, 2880 bp, Human
tgctgctctccgcccgcgtccggctcgtggccccctacttcgggcaccatggacacctcccggctcggtgtgctcctgtccttgcctgtgctgctgcagctggcgaccgggggcagctctcccaggtctggtgtgttgctgaggggctgccccacacactgtcattgcgagcccgacggcaggatgttgctcagggtggactgctccgacctggggctctcggagctgccttccaacctcagcgtcttcacctcctacctagacctcagtatgaacaacatcagtcagctgctcccgaatcccctgcccagtctccgcttcctggaggagttacgtcttgcgggaaacgctctgacatacattcccaagggagcattcactggcctttacagtcttaaagttcttatgctgcagaataatcagctaagacacgtacccacagaagctctgcagaatttgcgaagccttcaatccctgcgtctggatgctaaccacatcagctatgtgcccccaagctgtttcagtggcctgcattccctgaggcacctgtggctggatgacaatgcgttaacagaaatccccgtccaggcttttagaagtttatcggcattgcaagccatgaccttggccctgaacaaaatacaccacataccagactatgcctttggaaacctctccagcttggtagttctacatctccataacaatagaatccactccctgggaaagaaatgctttgatgggctccacagcctagagactttagatttaaattacaataaccttgatgaattccccactgcaattaggacactctccaaccttaaagaactaggatttcatagcaacaatatcaggtcgatacctgagaaagcatttgtaggcaacccttctcttattacaatacatttctatgacaatcccatccaatttgttgggagatctgcttttcaacatttacctgaactaagaacactgactctgaatggtgcctcacaaataactgaatttcctgatttaactggaactgcaaacctggagagtctgactttaactggagcacagatctcatctcttcctcaaaccgtctgcaatcagttacctaatctccaagtgctagatctgtcttacaacctattagaagatttacccagtttttcagtctgccaaaagcttcagaaaattgacctaagacataatgaaatctacgaaattaaagttgacactttccagcagttgcttagcctccgatcgctgaatttggcttggaacaaaattgctattattcaccccaatgcattttccactttgccatccctaataaagctggacctatcgtccaacctcctgtcgtcttttcctataactgggttacatggtttaactcacttaaaattaacaggaaatcatgccttacagagcttgatatcatctgaaaactttccagaactcaaggttatagaaatgccttatgcttaccagtgctgtgcatttggagtgtgtgagaatgcctataagatttctaatcaatggaataaaggtgacaacagcagtatggacgaccttcataagaaagatgctggaatgtttcaggctcaagatgaacgtgaccttgaagatttcctgcttgactttgaggaagacctgaaagcccttcattcagtgcagtgttcaccttccccaggccccttcaaaccctgtgaacacctgcttgatggctggctgatcagaattggagtgtggaccatagcagttctggcacttacttgtaatgctttggtgacttcaacagttttcagatcccctctgtacatttcccccattaaactgttaattggggtcatcgcagcagtgaacatgctcacgggagtctccagtgccgtgctggctggtgtggatgcgttcacttttggcagctttgcacgacatggtgcctggtgggagaatggggttggttgccatgtcattggttttttgtccatttttgcttcagaatcatctgttttcctgcttactctggcagccctggagcgtgggttctctgtgaaatattctgcaaaatttgaaacgaaagctccattttctagcctgaaagtaatcattttgctctgtgccctgctggccttgaccatggccgcagttcccctgctgggtggcagcaagtatggcgcctcccctctctgcctgcctttgccttttggggagcccagcaccatgggctacatggtcgctctcatcttgctcaattccctttgcttcctcatgatgaccattgcctacaccaagctctactgcaatttggacaagggagacctggagaatatttgggactgctctatggtaaaacacattgccctgttgctcttcaccaactgcatcctaaactgccctgtggctttcttgtccttctcctctttaataaaccttacatttatcagtcctgaagtaattaagtttatccttctggtggtagtcccacttcctgcatgtctcaatccccttctctacatcttgttcaatcctcactttaaggaggatctggtgagcctgagaaagcaaacctacgtctggacaagatcaaaacacccaagcttgatgtcaattaactctgatgatgtcgaaaaacagtcctgtgactcaactcaagccttggtaacctttaccagctccagcatcacttatgacctgcctcccagttccgtgccatcaccagcttatccagtgactgagagctgccatctttcctctgtggcatttgtcccatgtctctaattaatatgtgaaggaaaatgttttcaaaggttgagaacctgaaaatgtgagattgagtatatcagagcagtaattaataagaagagctgaggtgaaactcggtttaaa

SEQ ID NO: 22 - DNA, 5534 bp, Human
tctcccgggagccactcccatgggcgcctctccagcccctggcctggaagcaccaggaaccctggggatggggcagaccctcacagcccggggtctggagccggtgtcggagctcatctgggcccatgacctctccagacatttggcaaaatcaaggcccttagaccagggacagacccaagcccaggccctcccagaggtcctaggacgcaaccctttgtgcccttgggctctggaagaggtttgggaagggtttggggtggaagatggcaaagagcagcttggccaggtgaggatgaggcagggcagacacaggccagtggggcgtgccatgtgccacagatggagaggaccaggagccagtggcccggcaggcacagcccggttggcgtgggccagagcgcccatcactgacccgtgagaactcgactgcccctgccagctctggcactgccccctcccagccgccccgccctagcaccctggggggcaccccgcccaaccgtggcctggtccggcccctcccgccctttgctccagttcccgggcttggcacctatagtgggggtgccgcccgcctgccaggctccggggccgggcccacgggagggtggggcggctgggaagctggcacgctgccccgggggagcctctctcggcaggcgcccgggtgccgcgggggggagggggaacaaagggctcattctccccgtgcgcagccggtggcatcgccggggcgttggcggaagcccccggggcccgggagggggcaggcccaggcgcggccgccgaatcacgggctcctgtttcccgcagggtgctggaggaggaaaccggcggagcagcttccccactctcagttgcgcttctggcgatggcgatcagaggtcctgctgcgctctccgccgcgctctacctccattagccgcgctgcgcggtgctgcgccctcgccggtgcctctctcctgggtcccaggatcggcccccaccatccaggcacgacccccttccccggcccctcggcctttcccccaactcggccatctccgacccggggcgcgtgttccccccggcccggcgccttctctccctccgggggcacccgctccctagccccggcccggccctccccgcggcgcagcacggagtctcggcgtcccatggcgcaacctacggcctcggcccagaagctggtgcggccgatccgcgccgtgtgccgcatcctgcagatcccggagtccgacccctccaacctgcggccctagagcgcccccgccgccccgggggaaggagagcgcgagcgcgctgagcagacagagcgggagaacgcgtcctcgcccgccggccgggaggccccggagctggcccatggggagcaggcgcccggtgccggccacgacgaccgccaccgcccgcgccgcgaccggccggtgaagcccagggacccccctctgggagagccccatgagggcaggagagtgatggagagtacgcccagcttcctgaagggcaccccaacctgggagaagacggccccagagaacggcatcgtgagacaggagcccggcagcccgcctcgagatggactgcaccatgggccgctgtgcctgggagagcctgctcccttttggaggggcgtcctgagcaccccagactcctggcttccccctggcttcccccagggccccaaggacatgctcccacttgtggagggcgagggcccccagaatggggagaggaaggtcaactggctgggcagcaaagagggactgcgctggaaggaggccatgcttacccatccgctggcattctgcgggccagcgtgcccacctcgctgtggccccctgatgcctgagcatagtggtggccatctcaagagtgaccctgtggccttccggccctggcactgccctttccttctggagaccaagatcctggagcgagctcccttctgggtgcccacctgcttgccaccctacctagtgtctggcctgcccccagagcatccatgtgactggcccctgaccccgcacccctgggtatactccgggggccagcccaaagtgccctctgccttcagcttaggcagcaagggcttttactacaaggatccgagcattcccaggttggcaaaggagcccttggcagctgcggaacctgggttgtttggcttaaactctggtgggcacctgcagagagccggggaggccgaacgcccttcactgcaccagagggatggagagatgggagctggccggcagcagaatccttgcccgctcttcctggggcagccagacactgtgccctggacctcctggcccgcttgtcccccaggccttgttcatactcttggcaacgtctgggctgggccaggcgatgggaaccttgggtaccagctggggccaccagcaacaccaaggtgcccctctcctgagccgcctgtcacccagcggggctgctgttcatcctacccacccactaaaggtgggggtcttggcccttgtgggaagtgccaggagggcctggaggggggtgccagtggagccagcgaacccagcgaggaagtgaacaaggcctctggccccagggcctgtccccccagccaccacaccaagctgaagaagacatggctcacacggcactcggagcagtttgaatgtccacgcggctgccctgaggtcgaggagaggccggttgctcggctccgggccctcaaaagggcaggcagccccgaggtccagggagcaatgggcagtccagcccccaagcggccaccggacccttttccaggcactgcagaacagggggctgggggttggcaggaggtgcgggacacatcgatagggaacaaggatgtggactcgggacagcatgatgagcagaaaggaccccaagatggccaggccagtctccaggacccgggacttcaggacataccatgcctggctctccctgcaaaactggctcaatgccaaagttgtgcccaggcagctggagagggaggagggcacgcctgccactctcagcaagtgcggagatcgcctctgggaggggagctgcagcaggaggaagacacagccaccaactccagctctgaggaaggcccagggtccggccctgacagccggctcagcacaggcctcgccaagcacctgctcagtggtttgggggaccgactgtgccgcctgctgcggagggagcgggaggccctggcttgggcccagcgggaaggccaagggccagccgtgacagaggacagcccaggcattccacgctgctgcagccgttgccaccatggactcttcaacacccactggcgatgtccccgctgcagccaccggctgtgtgtggcctgtggtcgtgtggcaggcactgggcgggccagggagaaagcaggctttcaggagcagtccgcggaggagtgcacgcaggaggccgggcacgctgcctgttccctgatgctgacccagtttgtctccagccaggctttggcagagctgagcactgcaatgcaccaggtctgggtcaagtttgatatccgggggcactgcccctgccaagctgatgcccgggtatgggcccccggggatgcaggccagcagaaggaatcaacacagaaaacgcccccaactccacaaccttcctgcaatggcgacacccacaggaccaagagcatcaaagaggagacccccgattccgctgagaccccagcagaggaccgtgctggccgagggcccctgccttgtccttctctctgcgaactgctggcttctaccgcggtcaaactctgcttgggccatgagcgaatacacatggccttcgcccccgtcactccggccctgcccagtgatgaccgcatcaccaacatcctggacagcattatcgcacaggtggtggaacggaagatccaggagaaagccctggggccggggcttcgagctggcccgggtctgcgcaagggcctgggcctgcccctctctccagtgcggccccggctgcctcccccaggggctttgctgtggctgcaggagccccagccttgccctcggcgtggcttccacctcttccaggagcactggaggcagggccagcctgtgttggtgtcagggatccaaaggacattgcagggcaacctgtgggggacagaagctcttggggcacttggaggccaggtgcaggcgctgagccccctcggacctccccagcccagcagcctgggcagcacaacattctgggagggcttctcctggcctgagcttcgcccaaagtcagacgagggctctgtcctcctgctgcaccgagctttgggggatgaggacaccagcagggtggagaacctagctgccagtctgccacttccggagtactgcgccctccatggaaaactcaacctggcttcctacctcccaccgggccttgccctgcgtccactggagccccagctctgggcagcctatggtgtgagcccgcaccggggacacctggggaccaagaacctctgtgtggaggtggccgacctggtcagcatcctggtgcatgccgacacaccactgcctgcctggcaccgggcacagaaagacttcctttcaggcctggacggggaggggctctggtctccgggcagccaggtcagcactgtgtggcacgtgttccgggcacaggacgcccagcgcatccgccgctttctccagatggtgcagggcctggtgagcacagtcagcgtcactcagcacttcctctcccctgagacctctgccctctctgctcagctctgccaccagggacccagccttccccctgactgccacctgctttatgcccagatggactgggctgtgttccaagcagtgaaggtggccgtggggacattacaggaggccaaatagagggatgctaggtgtctgggatcggggtggggacaggtagaccaggtgctcagcccaggcacaacttcagcaggggatggcgctaggggacttggggatttctggtcaaccccacaagcaccactctgggcacaagcagggcactctgttcccctcccccttaagccaacaaccacagtgccaccaagctcacacctgtccttctcaggctggcatctcccccaccctgtgccccttttcatggtaccaggcccgcactgggggcaattgacttcctccaatccccactcctccgagacccaggagacaaacagcccttccttggggaaacttgggaatcattctggcttaaacaacacctcctcctgctgctcactcccgctgagcccactctactgccccagctccgtttctaccaccgcatcctcactgggctcactgcaggcatgctgaacaaggggcctccaaccttctgccctcctgccaaaagatctggggagtgtgaggagagggtggcatcaggagctgctcaggcttggcggagggagcggcatgggcgatgtcactcagccccttcccggtccgcccgcttccctccttcatgatttccattaaagtctgttgttttgtgaaaaaaaaaaaaaaaaa

SEQ ID NO: 23 - DNA, 633 bp, Human
actcttctggtccccacagactcagagagaacccaccatggtgctgtctcctgccgacaagaccaacgtcaaggccgcctggggtaaggtcggcgcgcacgctggcgagtatggtgcggaggccctggagaggatgttcctgtccttccccaccaccaagacctacttcccgcacttcgacctgagccacggctctgcccaggttaagggccacggcaagaaggtggccgacgcgctgaccaacgccgtggcgcacgtggacgacatgcccaacgcgctgtccgccctgagcgacctgcacgcgcacaagcttcgggtggacccggtcaacttcaagctcctaagccactgcctgctggtgaccctggccgcccacctccccgccgagttcacccctgcggtgcacgcctccctggacaagttcctggcttctgtgagcaccgtgctgacctccaaataccgttaagctggagcctcggtggccatgcttcttgccccttgggcctccccccagcccctcctccccttcctgcacccgtacccccgtggtctttgaataaagtctgagtgggcggcaaaaaaaaaaaaaaaaaaaaaaaaaacaaaaaaaaaaaaaaaaaaaaaaaaaaaaaa

SEQ ID NO: 24 - DNA, 393 bp, Human
  misc_feature (75)..(75): n is a, c, g, or t
  misc_feature (81)..(81): n is a, c, g, or t
  misc_feature (89)..(90): n is a, c, g, or t
  misc_feature (95)..(95): n is a, c, g, or t
  misc_feature (167)..(167): n is a, c, g, or t
  misc_feature (179)..(179): n is a, c, g, or t
  misc_feature (194)..(194): n is a, c, g, or t
  misc_feature (237)..(237): n is a, c, g, or t
  misc_feature (249)..(249): n is a, c, g, or t
  misc_feature (276)..(276): n is a, c, g, or t
  misc_feature (285)..(285): n is a, c, g, or t
  misc_feature (295)..(295): n is a, c, g, or t
  misc_feature (312)..(312): n is a, c, g, or t
  misc_feature (358)..(358): n is a, c, g, or t
  misc_feature (370)..(370): n is a, c, g, or t
  misc_feature (377)..(377): n is a, c, g, or t
tttttttttttgccgcccactcagactttattcaaagaccaggaagggccggtgcaaggaggggaggagggcccnttgganggccagcnnggaanggaacggctaccgaggctccagcttaacggtatttggaggtcagcacggtgctcacagaagccaggaacttntccagggaggcntgcaccgcaggggtngaactcggcggggaggtgggcggccagggtcaccagcaggcantggcttaggagnttgaagttgaccgggtccacccgaagnttttgcgcntgcaggtcgntcagggcggacagcgcntttgggcatttcgtccacgttgcgccacggcttttgggtcagcgcntcggccaccttntttgccntggccctttaacctgg

SEQ ID NO: 25 - DNA, 3726 bp, Human
cagcgctgctccccgggcgctcctccccgggcgctcctccccaggcctcccgggcgcttggatcccggccatctccgcacccttcaagtgggtgtgggtgatttcctggcggggggagcagccaggtgagcccaagatgctgctgcgctcgaagcctgcgctgccgccgccgctgatgctgctgctcctggggccgctgggtcccctctcccctggcgccctgccccgacctgcgcaagcacaggacgtcgtggacctggacttcttcacccaggagccgctgcacctggtgagcccctcgttcctgtccgtcaccattgacgccaacctggccacggacccgcggttcctcatcctcctgggttctccaaagcttcgtaccttggccagaggcttgtctcctgcgtacctgaggtttggtggcaccaagacagacttcctaattttcgatcccaagaaggaatcaacctttgaagagagaagttactggcaatctcaagtcaaccaggatatttgcaaatatggatccatccctcctgatgtggaggagaagttacggttggaatggccctaccaggagcaattgctactccgagaacactaccagaaaaagttcaagaacagcacctactcaagaagctctgtagatgtgctatacacttttgcaaactgctcaggactggacttgatctttggcctaaatgcgttattaagaacagcagatttgcagtggaacagttctaatgctcagttgctcctggactactgctcttccaaggggtataacatttcttgggaactaggcaatgaacctaacagtttccttaagaaggctgatattttcatcaatgggtcgcagttaggagaagattttattcaattgcataaacttctaagaaagtccaccttcaaaaatgcaaaactctatggtcctgatgttggtcagcctcgaagaaagacggctaagatgctgaagagcttcctgaaggctggtggagaagtgattgattcagttacatggcatcactactatttgaatggacggactgctaccagggaagattttctaaaccctgatgtattggacatttttatttcatctgtgcaaaaagttttccaggtggttgagagcaccaggcctggcaagaaggtctggttaggagaaacaagctctgcatatggaggcggagcgcccttgctatccgacacctttgcagctggctttatgtggctggataaattgggcctgtcagcccgaatgggaatagaagtggtgatgaggcaagtattctttggagcaggaaactaccatttagtggatgaaaacttcgatcctttacctgattattggctatctcttctgttcaagaaattggtgggcaccaaggtgttaatggcaagcgtgcaaggttcaaagagaaggaagcttcgagtataccttcattgcacaaacactgacaatccaaggtataaagaaggagatttaactctgtatgccataaacctccataatgtcaccaagtacttgcggttaccctatcctttttctaacaagcaagtggataaataccttctaagacctttgggacctcatggattactttccaaatctgtccaactcaatggtctaactctaaagatggtggatgatcaaaccttgccacctttaatggaaaaacctctccggccaggaagttcactgggcttgccagctttctcatatagtttttttgtgataagaaatgccaaagttgctgcttgcatctgaaaataaaatatactagtcctgacactgaatttttcaagtatactaagagtaaagcaactcaagttataggaaaggaagcagataccttgcaaagcaactagtgggtgcttgagagacactgggacactgtcagtgctagatttagcacagtattttgatctcgctaggtagaacactgctaataataatagctaataataccttgttccaaatactgcttagcattttgcatgttttacttttatctaaagttttgttttgttttattatttatttatttatttattttgtgacggagagagattccatctcaaaaaaacaagttattaaaaatgtatatgaatgctcctaatatggtcaggaagcaaggaagcgaaggatatattatgagttttaagaaggtgcttagctgtatatttatctttcaaaatgtattagaagattttagaattctttccttcatgtgccatctctacaggcacccatcagaaaaagcatactgccgttaccgtgaaactggttgtaaaagagaaactatctatttgcaccttaaaagacagctagattttgctgattttcttctttcggttttctttgtcagcaataatatgtgagaggacagattgttagatatgatagtataaaaaatggttaatgacaattcagaggcgaggagattctgtaaacttaaaattactataaatgaaattgatttgtcaagaggataaattttagaaaacacccaataccttataactgtctgttaatgcttgctttttctctacctttcttccttgtttcagttgggaagcttttggctgcaagtaacagaaactcctaattcaaatggcttaagcaataaggaaatgtatattcccacataactagacgttcaaacaggccaggctccagcacttcagtacgtcaccaggggatctgggttcttcccagctctctgctctgccatctttagcgctggcttcattctcagactctggtagcatgatggctgtagctgtttcatgggccccttcaaacctcatagcaaccagaggaagaaaatgagccattttttgagtctccttcatagacttgaataactctttttcagagcttctcacagcaaacctctcctcatgtctcctcatgtcttattgttcagaaatgggtaatgtggccatttcaccagtcactgccaacaacaacgaggttcctataattgtctctgagtaaccctttggaatggagagggtgttggtcagtctacaaactgaacactgcagttctgcgctttttaccagtgaaaaaatgtaattattttcccctcttaaggattaatattcttcaaatgtatgcctgttatggatatagtatctttaaaattttttattttaatagctttaggggtacacactttttgcttacaggggtgaattgtgtagtggtgaagactcggcttttaatgtacttgtcacctgagtgatgtacattgtacccaataggtaatttttcatccattaccctccttccgccctcttcccttctgagtctccaacatcccttataccactgtgtatgttcttgtgtacctacagctaagcttccacttataagtgagaacatgcagtatttggttttccattcctgagttacttcccttaggataacagcccccagttccgtccaagttgctgcaaaatacattattcttctttatggctgagtaatagtccatggtacatatataccacattttctttatccacttatcagttgatggacacttaggttaattccattcaatttcattcaatttaagtatatttgtaaggagctaaagctgaaaattaaattttagatctttcaatactcttaaattttatatgtaagtggtttttatattttcacatttgaaataaagtaatttttataaccttgaaaaaaaaaaaaaaaaaaaa

SEQ ID NO: 26 - DNA, 127145 bp, Human
gatcacaggtgtgagacaccacacccagccagaaattgaaccttggtgagagacactgagtggggaagggcagagactgggagttaggagttacagcatctgaaggccacatcctggagagatggccacagactcagccagtgaagaggaagtgctggggctggggccagaaccctgtctgtgtgacccctgagactgagctcagacacccctaaccctgaaggcacctctctttcaggaccaacagccaaaggcacagaagccactggcctgggagggactgtccctgggaatgaccctgctctctgagggctgggcatctggactccctctgctccagctcctctgtggttgtattcctccatttctattctaattagtcagtttccatggctggataccataaaatctcagtagaaggaagaacaggccaaccatcagagctgttcaatttcagaaaatctctttttgttgctggggacagagtctcactatgtcacccaggctggagtgcagtggcgcgatctcagctcactgaaacctctgcctcccgggttcaagcgattctcctgcctcagcctcctgagtagctgggattgcaggtgcatgccaccttgcctggctaatttttgtatttttagtagagatggggtttcaccatgttggccaggctggtctcaaactcctaacctcaggtgatccacccacctcagtctcccaaagtgtttggattacaggcgtcggccaccgcgcctggcccagaaaatctctttagtcgggacttgagaaagggactgggttccatctggtgggaatgggagggaggttcagtgtctgctgccagtgagacctgggtttgttccctcccccctggctgtgtgatggaggcaagacccttcattctttgagcctcagtgtcctgtctgtgaaacaggcaatgagcacatttatctcacagggtcccggtgaggcacattgggataacataggtgaagcccttaacacagttctgggcaaagcaatgtgacttctctcctccccagcggcacttgcaccacgtggggagaaactaggttaatacatccctgccacacataactaccaagtgcctgctgtgtgctggccacaacactaagagccttacatgtggtccttcatttaattttcaaagtgatgacgatgattctcagtgcacagatggagactctgagcccagagaggctaaataaactgctctcaaggacaccagcactttctgcaaagagccccagatcctaactaggacttacgttgcctgcgctgggaagagacccaaatgcctcccggctgtaggagtccctgattgcagacgtagggtctcagtccccgccccaagaagctgtaggtccagttgaagaagagacacacacaaggaaaaggaaattgaactgagaaggcaaagcgtgactgtggggcctctgctatatccagggtctccagagaaaggactagaagccactattccaattctgaggcctcagggaagcagcaagttcctgtgaggaaacaggatcccacaggtttcatcctcctcctgtcactcttctaggtggggagggagggctcccccacgtcccacataagcacacagaaaggagaggccagggcagcacaggctcagaacctgaaggacttggggacatcgccagccccatatccttgttttatacaccaggtagggcaggaactatggcaggtccacagaaaggggccggcagaagcacagccacgacgcaggccccctgggctgtccagtttctcccggacagaacatttcccttccctagcagcccccaacgtggagcactggatttggagtcaggagacctgtgtcttctgcaatcactctgagaccaactcctgtgtaatcgtgagtgagcgccttcccatctctgggcctcagcttccacctctctaaaatgagggggttggattccatccaatgttataagagccaaaggttatgagttggtagcgcccccaccattccgggtttctccaatctctccaggggcctcagagaccccagacagaagaggaacttggacagaggcttgggtgggggtggaggtggggattctgagccgtggatccaccctctgctgagtgccaggcctacaggcaggcaggcagagcaggcaagagccgtcccctacacaaagggaattggcccctcatggtgggacagaggccagaacccagctgggccctcaaccacccttctttcctccacaaccccctcccagggatggtggcatccgaagccagcctggcaagggaactggttgccacgtggggacttcccggagctgggggtgatgggaaacagggtgacgggaaacgtcctgaggttgcttcctccccttttgtttggatctcagactgacctgggaaccaactgggcagccatggggtattctgatggtggggagttggagggggagaagggacctgccccatcccctcaggctgctttgcaagttaaaatagctgtgaagatctatctcccagaattctaaaagctaaaataccttttgaaccaccaccagaccattatgcctggagtggaaggatgcttagaggaatcccttcttttttttgagatgaagtctcgctccatcacccaggctggagtgcagtggcgctatctcggctcactgcaacctccacttcccagggttcaagcaattctcctgctttagcctctcgattagctgggattacaggcgtgcaccaccacgcccggctaatttttctattttttagaagagacgagggttcaccatgttggccaggctggtctcgaactcatgaactcaaatgatccacccgcctcggcctcccaacacgctgggattacaggcgtgagccactgtgcccatctcgaatccctttttaaaacttcaggtatggctgggtgcggcggctcatgtctgtaatcccagcactatgggaggctgagtcgtgaagatcatttgagcccaggagttcaagaccagcctgggcaacataggagaactcgtctctattcaaaaaaataccaaaaaccaaaaaccaaaaaattgtaagtcatgacccactggtggatcttgaaattaattaagtcggtactctgagtaaatcagaatttttttttgagatggagtctcactctgtcacccaggctggagtgcagtggtgtgatcttggctcactgcaacctccacctcctgggatcaagcaattctcctgcctcagcctcccaagtaactgtgactacaggtgtactccgccatgcctggctaatattttgtattttagtacagacggggtttcaccatgttgcccaggctggtcttgaactcctgagctctggcaatctgcccacttcggcctcccaaactgctgggattataggcgtgagccaccgtgcctggccgcaaataaggatttaataatgacgatgataaaatagaagggaaaatctcagagcacatcctgggtagtaatagcaaactgtcttggctgtgtggtggctcatgcctctaatcccagcattttaggaggccaaggcaggaggactgcttgaggctaggagttaaaatcagcctaggcaacacagtgaggccccattcctacaaaaaaaaaaaaaaaaagaaagaaagaaaaaattagccgggtatggtggtgtgtgcctatagtcctagctactccagaggctgaggcgggaggattgcttgcgcccaggagttcaaggctgcagtgagccatgatcgtgccatggtacggcagcctgggtgacagagcaaggccccaactctgaaaaacaaaataaatacaataaaataaaatggtcaaaatggcctggtgcagtggctggtgcctgcaaccagagctacttgagaggctgaggcaggagaatcactggagcccaggaggttgaggcaccactgaactccagcctgggtgagagtgagatcctgtctctttaaaaaagaaaaaacaaaaaaagcaaactgtctcatgaaactcttgtttccatgttgcacgctctgccaggttgtgatgtaatgtatttcttactctgggtcacagtcacaaaaccttgaaatgtcactcactgtcttggctcatgcgtcgtaagcctttgttccccaacagggggaagtgaaccagcacacaaggcccttccgtcctgcggagctcactgccttcctcagctcctggcccgcacttccgaccacacactggggacacaccctcgggggggccccaccccagcagctgcccatgttcacacctcttcagttatttcaaactccgcctctctcggcctgatgcccaacacttccttcacccaaggaggtcctgttcaaatatcacttctggccaggcgcggtggctcaggtctataatcccagcacttcgggaggccccgaggcaggcagatcacctgaggtcaggagtttgagaccagcctggccaacaggtgaaaccccgtctctactaaaaatacaaaaattagccaggtgtggtggcacgtgcctgtagtcccagctactcaggaggctgaagcaggagaattgcttgaacctgggaagcggaggttgcagtgagccaagattgagccattgcactgcggcgtgggaggcagaggtagactctgtctcaaaaaaaaaaaaagtcactttctctgccagtcatatcttctgcaaccctgaggagccaggcaggacgacccctttaccctctgaatcaattggtctgtatcagggtctggcagagggaggggaagttggcccctctgatttaatggatgaatcaagaaaatgtgtgactgagccatggattcatggggatggggtcctggagcagaggcttgctgtgcacctactaggtgctgtgtacctcacaagccactggggacatcagaccaccagaataagtccactttccccaaggaaagtggtcaaatgtgggagccaggtgtgcaaatccccaccccagggtgataacagccccaataaaggcacatgcaagggggaccttcggagctgatgacactgtacaggcatctaagaggctggtgacagggtcaccaagcagaggtctagagcagggctgagtggggtagggggggttcttccaggcaaaaggcaaaaactctgttggtaccgtgtaggtcttccacagcacatgccacatgagaagaaacattcgcctggcgagtggctgaagtctataatcccagcactttgggaggctgaggcaggtggatcgcttgagccaaagagtttgagatcagcctgggcaacatggcaaaaccccgtctctacaaaaaatacaaaaattagccaggtgtggtaacccatgcctgtggtcccagctactcgggaggctgaggtgggaggattgcttaagcctaggaggtcaaggctgcagtgagccatgattgtgccaccacactccagcctcagtgacagagtgagaccctgtctcgaaaaaaaaaaaaaaaaaagagagggaaaggaaaaattttattttacatttatgtattgagggcagggaccatgcctgctgggctgctcaccactgctgagcaggattcctggtgtggcatcctaacacaataaatatttactgaatgtgtactcaggaaactgcaaagggttcaggctggcctgagagtaaagtgaaagaaggaagtggtagaagagcccagaggtctgtgaccccagaacctggagggcacctgtggcctgggtctttctcctgcaggcactggggaaaagtcggagggtttattttatttaattaacttatttattaatcaattaattttttgagatggagtctcactctgtcacccaagctggagtgcagtggtgcgatctcagctcactgcaacctctgcccaccgggttcaagcgattttcctgcctcccgagtagctgggattacaggcattcgccaccatgcccggctaatttttgtatttttagtagagatggggtttcaccaggctggccaagctggtctcgaactcctgacctcaagtgatcctcctgcctcggcctcccaaagtcctgggattacaggtgtgagccaccgcgccaggccggtaggagggtttaaacaggaaagagataagcagtcagattcatagtttagaaaatcctcaggttctggtgttcgggtggatgcctggagtggggatctggaaatcaggggcaggggttagtaataacccaggtgaggagacttgagtctagaggcagccaagtggggacctatggaggagttcacgtgctgcaggtgtgcgccgccgaggcggagccaggctctggagctgccaggggctcagaagcctccctctcagatctctccccttttggccacagatgggaaggagagaggcactcacccgacccagcgtggcagtacagtagtgtccaacctgtcactgttgggcgtggtggcgtgtacctgtagtcccagctactgaggaggctgagatggcagcagcacttgagcccaggagttggaggctgcagtgagccgacagcgccactgaactctagcctgggtgacagagcgagaccctgtctctaaaaaacagaaaagaaaaattacaggtcgggcgcagtggctcacgcctgtaatcccagcactttgggaggccgaggagggtggatcacgaggtcaggagttcaagaccagcctggccaatatggcgaaaccccgtctctactaaaaatacaaaaattagccaggcgtggtggtgtgcgcctgtagtttcagctacttgggaggctgaggcaggagaatagcttgaacccgggaggcggaggttgcagtgagccgagatcacgccactgcactccagcctggcaacagagcgagactctgtctcaaaaaaaaaaaaaaaaaaaaaaaaaaaagaaaaagaagaaaaagaaaaaagagaaagaaggaaagaattacataacagtaagcaacctagctagatttgaaccaggccctgcagttctaaagcactggcttttgcggagcggcactcactccgcatcgtggcataggtagatttcttttctaaaggtgaggtcagtgctgggcacttagcaggcgcccggtgggctgcgccgtcctggaggaaggctgattcctcccaccccgactcctggctcgtgggtgggtaatccagcacattctccccaccccggcaaccaactttgtggccgaacaagccctccccggcttgttccgctggtcccaggcgcctgcgcatccggacacgatgaggagcaggtgcgcggggccggggtgtgttcgagggggtcgtgcgcgcctgggctgcctccccgcggacggcggactgggccggggcggcgcttcctggcagagaggcgcggaggggcgtggctttggagaggtgcccccggcgggctggcggcctggctgcggtgaaaggcgggcggacgcaggtgacgacaaccgctccataaagggcgccgcggcgcgacgctcgccttatatgggcaggctcggcgcgggaggggcggggcgttccacccagctggctccgcaccgaggcccggccgaacccccgaggggggaaacttctctgcgagggtggagcctcctcagcggcgtccccaggtcccgagaggggtccctacccaggctaagactcacgacgggctccaccctgcaggggctcaacttgcagaaaccctggggcctgccttccccaggggtctgccctcctcaggccctgctagggcactgactcggtttgtgctgtgtggcgttttttccttcaccccacctgggccgcaggtcctcgctagatagccgagggagggtcctttaagtgagctcacctcggagcccccagataaccaagcctgagcctcccggctacatggcgaggcttccccaatccggtcagccccaagcaggtgcctttctctaactggcacaaaggaagtctcctagccaggctgagcccaagcctcggtaaacatgagccttggatccactggaagtgtttggctaactgggcccttcttggccagacaagactttaaccctaagaggaagctgccagcatgacgcagcccaccatattctccctccaagctctcttcatagcccgggtccttaaaaacccaaatctgtccaattgctacttgccgtccactcgttgacagttactccgcttcacagcctcccgatcacctgagtgtcctccctcggctcagtgcacagggctctgtgagcttacagttccctggttgccgttccgtgcctcccagccctgcacctgctgctcctttctggaaagccctttccttgcacactcccagacacgtgctcacccttcagagagatacttcttagcgtcttcttcctgacatttgtagtgattacttaacctttctgagcatcaatttcttcatctgcaagatgggggtaaaataatccccacctcactgtgttattgtgaggatcgaatgagttaatgtttgtaaaatgcctggcatatagtagctgctcatgaaaaactcgttgaccaaattcctcttcctgtgctctaattgctcatgtatgtgttgtgagtgccatgaaggctggcctcttccttttccagctatgcatacctagttcctggcacatatatagatcttgaaccagtgtttgttggcgaatgaatgaatttcaggcagtaggggtcggggagagaagagacccctaactgtgatggtcatcaaccctcacatctgccgggatgtagggcattctaatgcttcccccctcagttgcccagagcttcatggcaaccaggagggacacagcatggatatggaccccgttttccagataaacctatgagtgattagaggtgaagtaacttccccacggttacacaatgagtggaagagtcggcatcagggtgaccaacgtgtactttttttttttttttttgagacggagatttgctcttgtcgcccaggctggagtgcaatggcgcgatctcggctcactgcgacctctacctcccaggttcaagcaattctcctgcctcagcctcccaagtagttgggattacagttgcccacacgcccagctaattttgtatttttagtagagatggggtttcttcatgttggtcaggctggactcaaactcccaacctcgggtgatctgcccgcctcagcctcccaaagtgctgggattacaggcgtgagccactgtgcccggcccaatgtgtattattattattattattattttagcactgagagttccacgtcccaggaatctctttagtctcaggcagccaggatggttggtcacccaagatcaacttctaaacgttagtctctgaggaccgccaccttccaacctcccctgcacccgtcccattattcccaagtattttactgcgttcctgaaggggacacaggctctccagcccagaaggtccaacagattttaaaaagtcacactctgattccccaaaaaagttagactcacagcacagtagggatgggggacaaggacattggaagggcattgaggccaggtgtggtggctcacgcctgtaatcccagcactttgggaggctgaggcgggtggatcacttgaggtcaggagttcgagaccagcctggccaacatggtgaaaccccgtctctactaaaagtacaaaaacaagccaggtgtggtggtgcgcacctgtagtcccagctactcgggaggctgaggcaggagaatcgcttgaacccgggaggcaaatgttgcagtgagctgagatcgtgccactgcactccagcctgggcgacagagtgagactctgtctcaaaaaagaaaaaaaagaaggcccaggtaggagtttgcttcactttgacagggactcatgggccactcctgcaccaggccctgggcctgggaccaggaactgagagaaggctggcccccacctgtgggactctagccaggtgggggagacagatgtatagacacaatgccaacagtttggttcctcgacggctggagaagggagtgatcgaccagggtttctgaagaaccccctcctgacgtggccactcaccagctgacctcaggcctgtcccttcctttggctggccctggaccttctctgtcaactcaggcagttggagctggtccctgagggccttcctgccctgaagtcatgacttgtggggagctgagttctgggaaatgcatcctctggagaggcaccagaggccgcgcatgcctgagtgagtgtgggggtgcgccctggcctcactagccaaacaccaacttcatcttcccaggctaccctggcccgagcagctccggctccttccctgcctgcctcatcctcccaggccactgtccaggaagctggcctctctgcctgttccccacagcccctgggggtggggccagagtagggcaaaaagggcctgggcctggcccagcagagcctctgcccctccttcgggggctcctgttcttgtgggctgagagctgcagccctgcagccggcctggctgtggctcagtggtcagggccaagtgcagagcaaacaccctgcccactgggcagccatttcacggtcattcccaggctgcatggggtccccagtcgggcaactaagtgcagatgtgaaacaacgagctttccaagatccagggatttgacccttgggaaagagactccctaagggaactgcttcctgtcactccccaaccaccactttgagaaataattttctctccctcaacctcactgccagcctcagtcaagagcaaaccgaggactggtagtgggagctcagggccaccttgggattctctgctctcgctgctggctgagcccaggcaaggcccctgccctctctgggcttccatttccctctcctgctccaaacttgctagcttccttccctatctcaacatcatagggacccttcgagatgggaactactaataggggaaatcatatgggaaaccaggctgggcgcagtggctcacacctataatcccagtactttgggaggccgaggtgggaggatcacctgaggtcaggagttccagaccagcctgaccaacatggtgaaaccctgtgtctactaaaaatacaaaaattagccgggcgtggtggcaggtgcctgtaatcccagctactcaggaggctgagaggtaggggaatcacatgaacctgggaggtggaggttgcagtgagctgagatcctgccactgcactccagcctgggtaacagagtgagactccatctcaaaaataaaataaaaaatgaccatatccttataggaaccattattttgaactcagaatctcagaaaaaccaggatttggggcctggaactttctttgtcttattttgttttgttttggattttttggggagacagagtcttgctctgtcacccaggctggagtacagtggcgcgatctaggcttactgcaagctccgcctcccgggttcacgccattctcctgcctcagcctcccgccaccacgcctggctaattttttgtatttttagtagagatggggtttcaccgtgttagccaggatggtctccatctcctgacctcgtgatctgctcacctcggcctcccaaagtgctgggattacaggcgtgagccaccgtgcctggctggggcccggaactttctaaggcagaggcggcagagacaaagaggtggctggaggtggggcagtgccgagccaagtctcaggacatccctactgccgagcctcccctcccacaaagtaaaccggcaggtgggcagtgcaggcggggcccagctcgggtttcactccttccccgctctcggggacaataaaatgctccctttgccctggaaatcccacttgtataaaatccaaaagaagaaataagctcttatgttcaaacaggtttgttccaacctcatttataatggaaaaatattaactgaaaaattccttagtatccgacaatgggggagaagttaacagtttgaccggagctgagtgacatgcaaaagggtgtttgtggagtgcagggagctcctgctgtgtgtgtgggagggtggagagggcatggggagaggagcagggaccccagagtcagactgtctaggtttaaatcctgtctgctccttcctagctgtgtgaccttgagtcataacccaaagccctctgtacctccatgtccccctccataaactggcactgggctgggcatggtggcttatgcctgtaatcccagcattttgggagaccaaggcaggtggatcacctgaggtcaggagttagagaccagcctggccaacatggtgaaaccccgtctctactaaaaatacaaaaattagccaggtgtagtggcaggtgcctgtagtcccagctactcaggaggctgaggcaggagaatcgcttgaacccaggaggcagaggttgcagtgggccgagattgtgccactgtgctccagcctgggtaataggtgacagagcgagactccgtctcaaaacaaaacaaaacaaaaaaaaggagagagagacttgggggatgtgtgtgcccagaggaaaatccatgtgaggacccagcaagaaggtggccacccgcaagccaagcagagaggcttcaggagaaaccaaccctgccagcaccttgattttggacttccagccccagaactgtgaaaaaataaacatctgttgtttaaaccacccagtctgtgatattttgtgatggctggcctagcaaactaatacacattactaacacacaataagagaagcgtttaatagggcgcttaccacgtaattgcattgtgttctgacattacatttacgatctcataaccatgaggagggtcctgtcctcccatttcagagatgaaggaaactgaggcttggctagtgacggagagggctgtgactggagccaggactgtgtgactccaaggccccaccaaagcctcctcctgggatggaccatggactttcctgcctctgtgctgtgcatacgctctcccttctgcctggaatacccttcccaccacttgcctctcaggacgagtcccagtcgattcttcaaaactcttcttggcccggcaaggtggctcacacctgtaatcccagcactttggaaggccaaagtgggtggatcacttgaggttaggagtttgagaccggcctggccaacatggtgaaaccctgtctctactaaaaatacaaaaattagctgggccttgtggcaggtgcctgcaatcccagctattcaggaggctgaggcaggagaattgcttgaacctgggaggtggaggttgcagtgagccaagatcacaccactgcactccagcctgtgcaacagagttagactgtctcaaaacaaaaacaaaaaacaacttttctcaagcatcacctccttcccatgctttacccgacaatctccttttgcagatgtgctgcttttcagggcttgcggccagtctgtactctgtcaccatggtggtaaatgtcatctctcctgtagcatttagactttagatgtgtccatgtgtttgctgtgaactcctggaaggcaggggctgtgtcttgctctagttcctatcacccagcaggcccagaggggctccgcacagacgcttgctggctgaggtagccagtttggcctggagagagtattcccgcctcaggagtggatcatgaggaaatggaatctcctgcctccttgtggggtgggggttgggggaggtggataaaagagaggctccacctggcacggtggctcgtgcccataatcccagcactttgggaggccgaggtgggtagatcacctgaggtcaggattttgagaccagcctggccaacatggtgaaaccccatctctactaaaaatacaaaaattagctgggcacctgtaatcccagctactcgggaggctgaggctggacaatcgcttgaatccaggaggtggagcttgcagtgagccaagattgtgccactgcactccagcctgggggaaaagagcaaaattccatctaaaaaaaaaaaaaagcggatcaaggtccctactctgggcatgagaggagggatcctttgacactcctgggagcagcagtgtggcagaggaggaggagcagggcatggggtcagccaccctcagtccatttcccagggtgtggccttaggcacggtcactacctctctgggcttctgtctccacatgtatgaaatggaatcagtccctccttccacaggtgttaggtcgaagaaggcacctctggtggtatcggcacagaggctggacactggatgacttctttgctgggacactgaggtagggggcagaccagagacagacagctacttgcctaagctcacccagcaagctggctgaaggtggagaactggcttgtcctccagttggtagttaacagctgtctagcaggagtgttcttgctcccaggagacgctccgttggctgccacagaggtaagcgtgagagtgcgctcagaagtggctgggaggcatggagaacagaggagcaggttcagggtgaattccagtgggcattctccaagggtgaggtcactgcctccaactccctagggctgcctgagacacaggcaccaccaagccagctccagagcaggaggaggtggtggcagggaccagggccaggtcacagggctgaatgtaaggccctcagcctggtacagcgacgggcccctcccatggtgctggggtccttaccttgggaagcccggtgtttcctgtttaagatgtggctgggggtaggggaaaggagaaagccacacagataacacttctggaacttccaatcggtgccagcgtgcttccacctgctgagccgtgacctcatttgcagggactgtcatgagccccaacttggagatggtgcaactggggctcaaaatggtgaaaaccttgtcccaaaaggaaagcagtatagctaatgagcaagaacaaagagaatttgaaattaaagacattggggttcattcttttccccttttttaaaatttatttttgggccgggcacggtggctcacgcctgtaatcccagcactttgggacgctgaggtgggcggatcatttgaggtcaggagtttgagaccagcctggccaacatggtgaaaccctgtttctactaaaaatacaaaaattaaccaggcatggtggcaaatgcctgtaatcccagctactcgggaggctgaggcaggagagctgcttgaactcaggaggcgaaggaggttgcagtgggcagagatcatgccattctactccagcctgggcaacagagcaagattccatctcaaaaacaataaaataaataaataaaatttattttttatatttttattttttagaacaagatctcactctgtcacccaggctggagtgcagtggtgagatcacagctcactatagcctcaaactcctgggctcaagtgatcctcccacctcaccctcccaagtagctgggactacaggcgcacaccgccatgccaggctaatttttttttaaattttgtgtaaagacagggtcttgctatgttgcccaggttggtcccgaactcctaggctcaaacgatcctcttgccttggcctcccaaagtgctgggattacaggcgtgagccatcgtgtccggccacatcggagttcaaatctgagctctgaactccattcatgccaagttacttaagccctccaagcctcagtttccttgtctgtaaaatggcggtaacaatggtccctgctgttggggttgcggtggagactcagtgagaggattcatgtagcacacactcagtaagtgccagctgtcactgccagcctatttcaccaccgtgaacacagagcctcagaatggaaaagcagcctgcccaaggtcgcacaacttgcaggtggcacaggcaggatctgaatccagatcagattcttcccgccctacttctatcaccgtggaagggcctgggggggcctgcagccaggaggtggctggaaagggaggttccttggaacaaccagtggcccaggcttcctgcagagccggggaccccagccctggccagggtaagggtcacgcctgcagctggtgttccaggcatcggagaggaactgcggctgcaggcctggcagccttaccgtcgccagcatcctgccctccatggacacggccccaacattgttttctgggccgttccctgcccagagcccacacattcgggatttccgcagcttggccagcactaccttcgcttcctggagcagctttccccaggcggccggggtgggggttgagctggccctggcccctggtaggggcaggcactgctcggaaggcagtggcagcagcgccgtcaacatcctcttgacctgacaggtccttacccgagttctacctcctcagaaacacagcggccctcctcactcccctctcctgaggccagcgtagaaaaggccctacctcatttccactttagggtaggctggagtgagagcccgggttaaaatcctagccctactacaaaggtgctgtgacctgggcaagcctccccttccctctgcctcacaagggatgctgggtagcctgaggtgccttaggctgccctgacatcagctcagggatgaccggcgccccgtgctctgaggtctctgggcataataagctccttgatgacagggtcagtttctctcccgtgttctgcaagtttatttttattattattattatttttgagatggagtcttgctctgttgcccagactagagtgcaatggtgtgttctcatctcaccgcaacctctgcctcccaggttcaagcgattctcctgcctcagcctcccaagtagctgcgattacaggcgtgcactgccacgcccggcaaatttttgtatttttagtagaaaaggggtttcgccatgttggccaggctggtctcgaactcctgacctcaggtgatccacccgcctcggcttcccaaagtcctgggattacaggcgtgagccaccgcgcccggctccatgttctgtatatttagaaggaacctgtgtgagtggccaccaaacgttcactctgaaccatgctggcgctgcctgcaggtgagcgtgcctgcccagagtggtgtctcagttgtctcactgcccaccctggcgctccgtctcctctgtgggctggcacctgctccctggtagggcggagctgaggggcacaagggagcgtggaagtcaagcagccagcccagcaaactcgagcttccacccctgccgcctctctgcaggcaaccacgtgcactgggtgtcaagaaaaaatatacaggggccatatcccgggttgtcttcaggctcgggaagcctgcgactttgtcccctttccccggcttcccaacctggtggctaaaggcttccagcaggtgtctgccaaccccatccacagtcatggggcccaatgtggcacccagagaatgaccgtgggctgacagcccagagccagcggcatccccggtgaggtcagtgtcctggaattggtcaaacaggatcaccaggaggattccgtgagcacagccagcatgactcacggccatgatcagcctcacgggcagaggctgccaacctgggatggccacagccaccggctcaccttgcagggcaacgcaccttttaaggagggagctggagcagcgcccgggtcctgcctctggccaaggcctctgccacacttctccacgcccacccgggcagagaggccagacccccactgggttcaaatttggcaccacttttcagacatgaccttgggcaagtcgatttctctgaactgtttttttcacttatgatatggaaataatacttgcctcacaagagtggaattcgatgaggtaatgtgtttagaaagtgcgtggcaaacggtgccttttaaggagcggcagtggggtccggtggaaagggccagggctcgggagtcgaggcgccccagcattgtgctctggccccaccctgggctcactgggtgtctttgaaagagttactcaacctccgatctgctctgctcccactgtgtcaaatgagctgacaccacttgccttgttgcctgttgtgagatgaagatcacacacacgccaccttctatcagatgacaggaggcagcgagggtggttcctgggggtgggtgtggaaggctgcctggccttgaatcccagctcagccactcaggggctttgtgacctggggaaggctcctcaacctctcggggcaggtctcaggtggaatctgaagggcaacgccttcccgcggggctgtgctgagctgagaccctcaaaacagtgccaggtacctgggaggtgcctcctgagtctgggcaggtcctgctcatcttaaccagggcttttggcctttgcaggatgttcactccaccagcttccgtctccactgacgccagttgctggttttgtcccctccatgtgcttgtgacagaccccagggtctggggtccttcagaggccacgggcccctctcctccctcggtctcggcagccttcccaaggcagtccttgggtgggcccctggagaatgcagacagttctaatagaacagggtgagcctctgagaacagagcaataccagccccatggcatccctggggccacggagtagggtgtcaggatccccctgccgccaagcacctgattcacaggaagctggggcctcatccaggcaaccgagccctaatgacagcttggccctaggagcaaggcagacggaaggaaggctttcttgactggcaagcctggctcccttggcacactcctctatggccaaggggagctgggggccaagaggggttgtctggtcccaaggcccagaagttcctgcaggcacccatgggaaggatagcctgatccccacagggccaggcacctgctggggcagccaggagccctgtcagttggggaggcctcagaagggtcaaggggatcagctgtgggagcccaggtttcagaggcaaccacgtctggatagaaaccccagctctgcatcccatgagccacagtgtctacatcggggtaatggggacaacagcctcttgccttaggagggcacgaggactggcacatggcatccttagaatagcagccactgctgacaagcatgttagtgaacaggaagggctggttggagagagtgttgtggagttaggggaggatgtggggacagtggacaagccccctgggaaagggtgacaagtgctctgagcccacacagatgtgacattgcagatggtgcagacccttgctttatttgtctgacttgttcacagttcagccccctgctcagaaaaccaacgggccagctaaggagaggaggaggcaccttgagacttccggagtcgaggctctccagggttccccagcccatcaatcattttctgcaccccctgcctgggaggcagctccctggggggtgggaatgggtgactagaggggatttcagtgtgggacccagggtctgttcttcacagtaggaggtggaagggatgactaagttctttatcacagacctacaaaaaatgagataattagatattactctcactagtttgggcttcttttttctttttctttttacaaaacagcagctggaaagagaaatgtaggtggcagacgagccaggcacgaggtttcagattggaagggaccaagatgaggaccaaggtgtggctgcctgactaggaacgctgtgggctggcccaggctctcgccacacatcctgggagaactgccataggccctagaaggagggatgaaaggcgtatgggagggaagacagcggtccccggatcagcagcagcaccaccatcctctgatggcccctgggcagtccgccagctcggaagcactcagggctggagcctgggctctaagcatgggccccaggagccagacaggagggaggcagcaggaagggctggcatggaagggctgagttctattggggtcccacgcgggcaagggaaccaggactcatccctgcttgtcagccaatcagcttcttcaggaaggcctccaactgatcctcatccttgatgcccacaaacttgtccaccacgtccccattcttcatggccagcacagtgggcaccgctgacacctgggtggagaggacaagggggtccaagtgaattgggagtgaatacttctcaactgccactcctgagcctttgtggggaaggctggtggcttatccagggcactgacttcccaaagccatgggcaggcctagaggaacatggctcttctctcggtgcaggggtactgcagggcccgggggccacccgctgaagaaacgtcttccattgcgggctcccaacagtacccttcctcccttaaccacaagactgactcactggcccagtggttttgctggaatgacaggagagatgaaaataacccttgcagctgcaggccagggctgggggcagggaggagctcaggggaagcctggcccaggaggagacagaagctgggggacagttcgagtcctggctttgcactcactagcaagggggccttggccgggtcacagcacctttctgagcctcagtgtccttttccataaaatgggggtaatgtctacctttagggtttgggatgaacattaaagattcaagtataggctgggcacagtggcttatatctataatcccagccttctgggagactgaggctggaggattgcttgagttcaagagttccagaccagcttgggcaatatagtgagaccctttgtttactaaacccccccaaaatattagccaggcatggtggtacatgcctgtactcccatactcgggaggctgaggcaggaggatcgcttgagcctgggagactgaggcttcagtgagctgtgattgtgccactgcactccagcctgggtgacagagaccctgcctcaaaaaaaaagagaaagatttgagtataaagcagagctcaggctgggcgcggtggctcacacctgtaatcccagcattttgggaggctgaggtgggcagatcatttgaggtcaggagttcgagaccagcctggccaacatggtgaaaccctgtctctactgaaaatacaaaaattagtcgggcatggtggcaggcacctgtaatcccacctacttgggaggctgaggtgagagaattgcttgaacctgggaggtggaggctggagtcagtggagattgcaccactgcactccagcctgggtgacagagtgagactccatctcataaataaataaataaataaataaataaatacataaataaagcagagctcaggttctggcggacgcaatccggctcctaccagccaggtgagctggggcacgcccctcagtcactaagcctcagtgttctcagatgcaggatggagatactaagggcactgccattagagggcatgaaagctgaatgaaataacgcaagtaaaggctcagcacagcgcccggcaaataagcttaggaacctggcattgtgcctggcatactgtgggcattcaaaaaacagtggctacagagggcacaaggaaaagtccaacacaggccccacgagagcacattagcttgctgctgtgatgagtgacagggtccagaaactcagggacttctactggacagcatgagaggagaggcttggccatacacaacctgacgcttattagcaggttgcaggcagatggcaaggacaacattcttggtctgtgaagcatttactcagttccctcagggacctgcataggttatgtggaacgtggatgaggctgtggcccaccagactggcattgtgaggtctctgctgcctgggatccctgcctggcattcgtgggcatttgagaaaaccatttaaacagaacaagataggccggtcgctgtggctcacgcctgtaatcctagcattttgggaagccaaagcgggcagatcacttgaggtcaggagttcgagaccagcctgaccaacatggtgaaaccccgtctctactaaaaatacaaaaattagccgggcgtggtggggcatgcctatagtcccagctactcgggaggctgaggcaggagaatcgcttgaacccgggaggcagaggttgcactgagctgagattgtgccattgcattccagcctgggcgacagagcaagactctgttccccccctcaaaataaataaataaaaataaacagaacaagataaacacagacttttcttacatacaaattaaactacaaagtaagagcagagattcacacaaacataccaggtcttcacatatcccagtgctgccctgccacggcccatcttggaagccagtaagattcagaatgttcaaaaaccatgcacatggtagttaggaaaggcacgcaggccagaccatcccgccctcacccactaactttacgtggcaggccctgcaccccactcctcacggacactttggggacaaacacagcaggtcacaggacacagtccttgtccttgttagtgcctcaggccccttcaaaggctgtccctgggctgatgtgggtggcaaaccctgtctccaggcagagcagggcccgaaagagtttgctccaggaagcgcctgaagccaccagggccttcccaggcattctttggtgccctctagtggtctgcaaaggcagctggagtgcctcaaagccggagcctcttggcagaagcagagagctcagccaccggctcccacctgcacactgtcctattcctttaattaaaatatatgctttatgccactgtataagaagtggcctaacttttttcacggcaagactctaagttcactgaagaggctcagagagtggacttagcgttccttaagaactccagataggcacaagcacagtggctcacacctgtaatcccaagtactttgggaggccaaggcaggaggactgcttgaggtcaggaattcatgaccagcctgggcaacatagcaagacgtcgtctccataaaaatattaaaaaaaaaaaaaaagaactccagatgaaggccataatgatctcactcatgtaaacctccacacatgcttgaacacgcacagaccctgctggtgtcaggtagacagcagatgtgctgtcaatggaggtctggtcactactgatcaaggggatattttgaagttgagcttaaacacacacacgcatacacacatatatacacacacacacatacacactacccgcactaggggctcacaggaaacctgagctggaatgggacttccctcgaccctgaggaggcggctgaagctctgctgctcctgtgtctggctcacacatcaggaggtgccggtgcctgtaaacactgccttacatggaagtgcacagggccttggcacattcttctggaatgttttgagtgtgaaagaggcagtgactgagccaactgaggggctgaggaaaagatacgctacgacgtgttgcctgtcctgttccgtgaagccacttggaacctcctatccttggataaagaccctctgaactcggcaggagtgggggagtgtgtacgtgtgcgcagtctctttctgctaacccgtagctcgcctgcaccgccactgagctccgtgtcctggtatgtcttctcctgtcccaccccgatggcatccatctgttaactcagctaagggcctaccaagggaaaggcacagtgctgggtgctgcgggatgttgcaacctcctcctcggctcattgcagagttaaaaggaaaagatcgctgtcacatgctgggtgctttttcgtgtcaggaatgatataaacacctctatacactatctcacactctcctggctgtgggcaggatcattttaacgatgagaatactgaggctcaaagggtgagcaactgttccaaaatgatgtggtgtaggacaggcgcggcagctcctgcctgtaatcccagcactttgggaggctgaggaaggtgaatcatctgaggtcaggaattcgagacaaggccggccaatgtggtgaaaccttgtctctaccaaaaatacaaaaattaggccgggcgtggtggctcacgcctgtaattccagcactttgggaggctgaggcaggagaagtgcttgaatgcgggagatggaggtcgcagtgagccgagattgcgccacttcactccacctgggtgaaaagagtgagaccccctctaaaaaaaaaaaaaaaaaaaagctgggatctgaaacaagatctgtttgactttgcagtccaggggatcaaactctgttgtgcttctgcccagcagcaaagagagagagacatctactgagtcccagcagggggaagaacgtggggacgcattaaaggatttcatgcttcaaatgcaaaatgccaagtgctttgtaaaagcttttagatatgagagggttcttggaaaaacgattattgaaaaaatgaactacataacattctggcagaattaggtagacagtgaaaagatcaagagtcgccaggcctggagggaggaggaaggagagatgaacaggcagaggagagaggacatggaggcagtgaaatgactctggatgatgctagaatgtggacaccggctatgacacatttgtccaaacccacagcaggcacaacaccaagagtgatcccctatgtaaacttttggctttgggggataatgatgtccgtgtaggttcataagttgtgacaaatggaccaccctggtatgggctgttgatagtgtgggaggctgggcatgcgggaggacaggggacttatgggaagtctctgtaccttccccttcctctcaattttgccacgaacctaaaactgccctaaaaacataaaatcctcaaaaagaacaacaacaaaaaatgagatcagtgactgctggggggttaagggggtgaggggcaggaaggagaggtgaactgctggaaaacaggggaaccgagggcggtggaacggttctgtatggcgctggaatggtggacacatgccattatacatttgtccatgaactttctcactggcaagcagtctgtgctgagagcggcagctgagacacggccttccaaagagcagttcctccccacagaaagtcagtccggggccttcagaaccagaaagtcaatctggggccttcagaatgaaaaagtcagtatggggccttcagaacattggcttctctccatgtcggctcaggacacccagccctggcattacctgggagcttgttagaaatgcagtcttggtggccgggcgcggtggctcatgcctgtaatgccagcactctgggaggccgaggtgggcgaatcacttgaggtgaggagtttgagaccaatctggtcaacatggtgaaaccccatctctactaaaaatacaaaaattaggccaggtgtagtggctcacgcccgcaatcctagcactttgggaggccgaggcgggctgatcacctgatgtcaggagtttgagaccagcctggcaaacatggtaaaaccttgtctctattaaaactacaaaaattagctgggcgtggtcgtgggcacctgtaatcccagctactcgggaggctgaggcaggagaatcgcttgaacctgagaagcggaggttgcagtgaaccgagatcgtgccattgcactccagcctgggcgacagagcgagactccatctcaaaaaagaaaaaggattttaggccttaaagaaagccatcatggggggcactgtagttctctcagaggaaacttcttcctcaggctctcttcagaaagaaaagaggaaggaaggaaagaaggaagggagggagagagggagggggtcaggaagaaccctggctggagcttcctaaaccctgcaatgatgtcagaccagggtttggctaaacaacacggctgagaccaagtgatgtgggcctagcagccttgaggcctttctgtgtgacagcacagtccccaggcagtggacagggcgggagcggtgggtgtggggggagattgagaggattccacaggaggcatctccttctcacttcccaggcttcaccgcaggccttcagtgcccactcccacaacagcctcccggggacggtcctcggcattcccgccaccccacgagacactggagcagggcctgtgggcttctttgcatctgcagtagttaccatagtccctgcacatggctggccctcagggggtgtctgctgaagagttatgaatacattggctgaagctgaagctgtagtgtctggcagagccaggaggcctgagacatctgaagcccacgcgtgacctgtgggaggccctaggagccccagcccgggctctcacccgaggcatagccaggcaggggaaagccaggggcatccaaatgggcagatagatgcctccctcactgagcaatcagtggccaaactttttgaaaaagtgactcacccctcccccagcccctgtaaacagccctcagttcctaactcccaaagcaggcctgctccagtggtcacctgtagtggccaccgtgtttgtctgcctggtctccatctcccctgcttctggtcattgcagactgatgttcctttgggtaatcactccccactccctgcgtagctcaaggggcggccagcctgttctcaccccgctcccaaccacccatttcttgctgcaggagactggttcagggatgggtgcctctatttgagctggtctagtaagagtgaaacctggacttgtatactctgaggaataaagcggcctctttcattcacttgttacctggaggaggaaggagggaggggtgaaggctcactccggccaggttaagatatttcaagaaaatcagatatcgagattttcacatgaaatctgagtttcaaatatcagcatctgcttcctattactttaaaatacttcgagtgccagactaaaagtgtctgtgagccaggttgggcccagaggctgccaggagcgccctcggctctgtaacagcgctaccttcagcatggctattcagagaccctcccaatccggctgcattatgctttccccagctccgtactcggcccttcactctggccacccagacaaagtgggcctctcccctttctccaggtagtggtctccaaggcccagaggaagcccccaacccagacacctccaggcacctggcccctgctggtctgtaagcaacccaggctcatcagacctcagggcttttgctttgcctgaattgttcttccaaagacccacatgcttcagtcactcccttcctgtttttgcccaaaggtcagcttatcagggagatctaccctatcccaccctttaaaaaagaaacccgctgggcgcggtggcttacgcctgtaatcccagcactttgggaggccaaggcaggtgggtcacccgaggtcaggagatcaagaccagcctggctaacatggtgaaacctcatttctactaaaaatacaaaaaattagccggcgtggtggcgcgtgcctgtaatctcagctactccggaggctgggacaggagaactgcttgaacccgggaggcagaggttgcagtgagccgagattgtgccactgcactccagcttgggcaacaagagcaaaactctgtctcgaaaaaacaaaaaccctgcctcatacgcagtactcccatcctctcttcctgatgtatttttctccattgaacttattatctaaaacaggggtcagcaaactatagttcacaggcccaatacagcctactgcttgtttttgtaaataaagttttattgtaacacagccatgcccatttgtttgtatagtgtctatggctgctttcggctacgagcccagctgaatggttgtagcagcgaccactgccctgcaatgcttccaataccaaccagtcctttagagaaaaagtttgctgacccttgatttaaaatactagaatgtagactccacggaggcagagattttgtcagttttgttcactgccttatcctcaacaccaagtaacactacctggcacttgagggactctcaaatatctgctgaataaacagacaaaccaaccaaccaagtgagacgactccatgtctttgtgcacgctgtttcctcagcccttcctcctcctctgcgcatccctcatggctcagctcagaggttctctctaacgtgaagcattccctgtcccctccagctcccccacaagcaaacagtcccttcttcctttatgcgcctcttcttttagcacttctatattgagatgatctttctacctgctgttctctcctgctagactaggagagatcttgcttggaaacaagatctcatcttgtgtcagaatcacaaatgcttggcacatcgagctcccaaatgactgctcactgaacatgtgggtagatggataaaggaatgtaccaatgtctgagactaagtgaatgacctggtgtttttgggtcatacgatctacttcctaaaggtggtgaagagagacaggtggctcagaggatcaagagccacctctgcaaagtgctctgagctcttaaaagctctcgaaaaaccggctgggcgcagtggctcatgcctgtaatcccagcactttgggaggccaaggtgggtggatcataaggtcaggagttccagaccagtctggccaacatggtgataccctgtctctactaaaaatacaaaaaattagctgggcgtggtggtgtgcgcctgtagtcccagctacttgggaggctgaggcaggagaatcgcgtgaacccgggaggcagaggttgcaatgagccgagatcatgccattgcactctagcccaggtgacagtgagagattccgtctcaaaaaaaaaaagctctggaaaaaccaagacaccttgcttactggctacctgtgctccccaagatacctcctacaccagctatccctgggcctgacacctcctatactggcttccctgtggcaactccctgtcaatccatacctcatactcaatggcgaggtctgtgtggtcatcaatatccaccttggccatcaccaccttcccgtgctgcttggccaccatcttctctaacctcggccccaggatcttgcagggtccacaccacctcaaaaggcgagaaaggaagcatccagtcagtcaaaagagcgctcagcatcccctactggcttcccagacctgcatctttccaaggaatcttttgcccttattatctctgtttaccatgtttaaaaattaacacaccaaatggtaatgccaggagattctgcacatgggaaatcttcacagatcccagacttttaaaacacaggcctcatcagaagactcataataaaagtgactcatttcagtatatctcagataaatatactgtcatataaaaggatatgggattggaagttaaaaggttcaaacagaggcttctcaccaaccagctgattattctggggccctagtttcctttttttctttttttgagacggagtctcgctctatcccccaggctggagtgcagtggcgcgatctcggctcactgcaagctccgcctccctggtttacgccattctcctgcctcagcttcctcagtagctgggactacaggtgcctgccaacacgcccagctaattttttgtattttttagtagagacggggtttcaccgtgttagccaggatggtctcgatctcctgacctcgtgatccgcctgtctcggcctcccaaagtgctgggattacaggcatgagccaccgcgcccggcctgggccctagtttcttcatctgaaaaagagagattatggctctcaaagctattaggagagatcaactaaggcaatgtgggtaaacatgcattggaagctgtggggatatttcaaacaccatgtggactcagaactaaaaggaggggaaccaatggcctggagcgtctacaacgcaccagtccctggctcactttctctgcttttaccaaacacacccctcaactctgcaaagagaacacaccttccaaagaaactgaagcccatacgagttaagaaacctgtgcaagattagagaagcacagctgggatcgatcacaacccaaagctgtgttgaaagtgttttctttggccgggtgcggtgacccacgcctataattccagcactttgggaggccgaggcaggcggatcacctgaggtcaggagttcaagatcagcctggccaacatggtaaaacctcgtctctactaaaaatacaaagattagccaggagtggtggtgtgcgcctgtaatcccagcttctaggaaggctgaggcaggagaatcactttaacctgggaggcagaggttgaagtgagctgagattgtgccactgcactccagcctgggcgacagagactctgtctcaaaaaaaaaaaaaaaaaaaaaagagaaagtgttttatttcacccacaggctactctgatcccacagcccctgagttgaccattatcactgccctgatcataggtattcccctctcgctggggaagctcatccaggacaggcctggtgctgtcatctctatgtatgtggcaccaaggaaagtgcctggcactgaatgaacaactcacaccaccccacttccttactgaacaaaatgaggcattatcccatttattgttcatttcggaaggcctctctggaatgctcactacaccaggaggccaagacagttccacctttcacaaacccctggctgacaactcctattttattctcagcacttacttatttatttttgagatggagtctcactctgttgcccaggctggagtgcaatggcgcgatctcggctcactgcaacttccgcctcccgggttcaagcaattctcctgcctcagcctcctgagtagcaggtgtggtggtgcacaccgcacccagccaggcctgacggttttaaatgctgaaaaataggccgggcataatggctcacacctgtaatcctagcactctgggaggccaaggcgggagagaatcacctgtggtcaggagtttgagagactagcctggccaatatggtgaaaccccgtctctactaaaaatacaaaaaaattatctgggtggtagtcccaactacttgggaggctgaggcaggaaaattgttttaactcgggaggtggaggttgcagtgagctgactgaaccactgcagtccagcctgggtgacagaatgagactctgtctcaaaaacaaaaaaggaaaaaaaaccctcaggcctggcgcagtggttcatgcctgtaatcctagcactttgggaggccaaggtgggaggattgcttgagatcaggaggtagagactgcagtgagccgtgatcgcaccactgcactctacattctagcctgggtgacagagtgagaccttgtctctaaaagaagaaaaacaaaaacaactcataacactgaaaaacccagtgtgcaagaccttatctcctattacaagtgaagaaagggagcacaaagatatcaagtggcctgcccaaggccacagggtgagtcagagaaacaactggaaagccagcgaaacaatctgtcagagacctgaccagaaggcccttcaatttctttttctttttttttttttttgagatggagtttccctctgtcacccaggctggagtgcaatggcgcgatctcagctcactgcaacctccacctcccaggttcaagcgattctcctgcctcagcctcttgggtagctgggattacaggtgcccgccaccacgcccgattaatttttgtatttttggtagagatggggtttcactatgttggctgggcaggtctcaaactcctgacctcaggtaatccacctgcctcggcctctgaaagtgctgggattacaggtgtgagccactgcgtccgacctgaaggcccctgaatttttaacttatgctacactggtttctcccaggatgcctcattcagagggctttgtccagcttttgtgtagttgggtgtctagccaggccccaaagatctagaaatgaaaaagcccaggctaaaattcagaaggccagagggacttaaatatctctaaagcaaactcagatagcactgaaaggaaactccttcctatgccctgtatgcttgggcaccacggtagtgacaccgataactttttttttttttttttgagatggaatttcactctttttgcccaggctggagtgtaatggcgcgatcttcagctcactacaaacactacctcttaggttcaagtgattctcctgcctcagcctcccgagtagctgggattacaggcacacaccaccacgcctagctaattttgtatttttaatagagacagggtatcaccatgttggccaggctggtcttgaactcctgacctcaggtgatctgcccgccttggcctcccaaagtgctgggattacaggcatgagccaccgcacccggccgacactgataactttttgccagcccttcttgcggttttcatggcaggatgttaacatcagcttatctgcagggccaggaactggtatacaccaaaagcaaggtgacagtcatatttttccaactctggtccatgctaaagatgacgctgagctttctggggattgagaaacagaacatgtgtttcccagcactaacagtcagctttgcagactgttcacttgtctgtcttccaccagactgcattccccttgagggcagggactgggcctgaccagtctgtatattgagtctacatatgagcagcatagaacatggccgtgggacacagcaggcattcaataaatacttgaacaagtaggaccctagtcttctgtggacccccaatactcactgtgcgtggaaatccacaaccactggtgtctcactgttgaccactcggtcttgaaagtcaggtccatcctggatattaaaggttgtcaaggagatcctcgtggtgtatattgtccgggctgggttgggtgttacagtcaggccaccaggactgcattgtggggtctgcagggctctggaagtgaggggtggccactgaccctgagagggcttcctggagatgacagaggccaggaacctcctcagaagaagtcgctgagccatctgtgagggaaagaggcagaagaactggggcacacaaaaggaagtcgacacactagaaaaagatttggggagtactcagggctcaggaagaggcagagttggaagcaaaatgcaaggaaatcatatgtaagatttgtagcgtggaagtgaggaagcaatgagaatcaaagggaaggaacagctaggcaaaccagaaggacaggaaaactggcttcacaaccaaaaagaaatcgggatttagattataacggaagaatgggaggaagaaaccaacagatttaataatgtatgtaaggaccaagtaccttacacacattattggtcttcctacagcaacttccaggaagttgctattgtactgcccacactgcgagtaagggaaggaatacgaggctcaagtaagttaagtgacatgcccaaagtaaccccgctattaaatgacagccaacactggaacccagggtcgtctgaaaagatgaaacgcaacaattcaaggaggaactaagagtgtgagaggaaccaaaaacgaagagacatgtactggagggaaccaataaagaagggacatgtgtggagggaactgggaaaaatcggacatcaccagggaccctggctctccggcgagctagatccccccgcccgcccggccgccagcctgcgcaggaacgcgctcgcggcatgcctcagccgcgacaccacctcgagccacccccacagggctcctacctccctgcaatgcgagcggagggatgcacagcctagccctccctgcctgtcaagggcacgcctgtcgtcacttcctcggggggggacgtacataacgtcacttccgggtacaggcaggcggaagagcgtccctctccaattttttttttttttttttttttttttgagccagagtctcgctctgttgccaggctggggtgcagtggcgcgatctcggctcactgcaacctccgccttccgggttcaagcgattctcctgcctcagcctcccgactagaggcgcgcgccaccacgcccagctaatttttttatttttagtagagacggggtttcaccacgttggccaggacggtctcgatcttttgacctcgtgatccgcccgcctcggcttctcagagggttgtgattacgggcgtgagccacagcgcccatctgtccctctccaatttgaggggcgtctgggattttccgccaatgggaatggcgggctgaggcacagttgaaggggcggggcctcagctacggaccggaagcaatgggcaggccgtcggggaacggattggaagaggcgggcgggccctggtctgggcgaaggcgggggcggggcggggcggaaacggaaggggtgggcgggccctagaggagggaccggaagaggaggtgatggagcaggggtagcaatggagggtacttaagggagaaaaggcagttgagaagtccccgtggttttggattttgcaaactcttgttgctttattttatttacatatatttatttattaatgacagagtctcgctctgtctcccaggctacagtgcagtggcgtgatctccgctcactgcaacatccaaatcccgggttcaagtgattttcctgcctcagcctcccaggtagctgggattacaggcgcgcgccaccacgccgggctgatttttgtatttttagtagagacggagtttcgccatgttggccaggctggtctggaactcctgagctcaagtgatccgcccgcttcagcctcccaaagtgctgggattacaggcgtgagccaccttgcctggcctcctgtttataactggcgctgtccacttcctacagatgttgacaggttctgtttctccatttaatatgtaaagctaagctcctcaaaggcatgatgccctttatatgtaaaagaactcaaccgggagtttaggggccatcctttaagtggccctcgtctgtgtccgcctaaaggaaaacaaatgaaaactgaggcgagcctaatttaagcagggagtttttttgggtcaagttcgaagactgcaactcggagcagagattcaagttgtcctgaatatacactcggattagcagcagctgaaagagcgtttttaaaagaacaggcagtttccaaattgttgatcaaagttttttttttttttttttttttttttgagacagagtctcgctcttgttgcccaggctggagtgcagtggcgcgatctcggctcactgcaacctctgcctcctgggttcaagggattcttctccctctgcctccccagtagctgggactacaggcgtgcctcaccacgcctagctaatttttatatttttagtagagacggagtttcaccatgttggctaggatggtctcgatctattgacctcatgatctgcccacctgggcctcccaaagtgctggaattacaggcgtgagccactgcacccagcctttttttttttttttttgagacggagtcttgctctgtagctaggctggagtgcagtggcatgatcttggctcaccgcaacctccacctccagggttcaagggattctcctgcctcagccccccaagtacttgggattacaggcgagcaccaccacacctggctaattttttatatttttggtacagaaattttatatttcaccatgttggccaggctggtctcgaactcctgaccttaagttatcgctcgcctcggcttcccaaagtgctgggataacaggcgtgagccaccgcgcctggccgccctgcccatttttgtatcggttttctgtgtctctagcactttcttttccacagccacctatcaatcctattcagcacttccacagtattttctagagagccaattttcctgcctaattcacattctgaatttcacaggcggaccagtcctgtttgtccttatgccatagtcacttcaccctgatcggcctcaggcttctcatctgagcaatgggaagaatgcctttctcatagctgggctgagggttgcagtagagacagaatccacatcattgctgcctgatgactcctgcagggaaagcctgagagacacagagaaggctgagctctcggcgcgctacaaaagggctctcagctacatggtggctcctctgtccagctagagctgagctggcctgggtctggcttagtcacaagcaggctcagggcacagctgagaggcaaagggaaggaagccaggactggcagcctgggctaagggtaaaacttctacctcctaccaatatttattgcagtgtttttcaaactgcaggatatggacgtcagtgggtttgcaaaattaatttagtgggtggtgatctgctttttaaaaaaacaaacatggtgccaggcgtggtggctcacacctgtaatcccagcactttgggaggccaaggcgggcagttcacttgaggtcaggagttcgagaccagcctggccaacatggtgaaaccccatctctactaaaaatacaaaaattagccaagcgtggtggtacacgcctgtagccccagctactcgggaggctgggcaggagaatggcgtgaacccgggaggcggagcttgcagtgagccgagatagtgccactgcactctggcctgggcgaaagagcaagactctgtctcaaaaaaaaaaaaaaaaaaaatagctctaaggtcttgcactaaccggtatgacctgtctggcgtctttacaggcagtattggaatgttatagggagacatacagggtttaagaaatccatcacggagaagaccttcaattatcaattataggttttaaatttacctcggctttgaaaggaataggatacattgctttctctttactacttccccaggggtttgtaatttaacatgaaactgagtaatctgtaactttcctcgattctcgtcttttgaccataccttgggatgaatgagttctttgtctgtggtggggagcaagtttagggaggggaggaatcttccctgattaatatagaggcctaagccaaattttagcattaaatctctctaataggtttgttcctgcctctggaataaacagaaatttaatattagctgatttgcttttatatatgacttttgttctttttcccatttgggacattttcttttgaagtgacctatttttaatctgaaacatttattttgtcctctttctctccctttgcctctccctctctgcctctttttctctctcactctttctctttgcctctctctctgcctctctcttcctctttgactctctccctttgcctttctctctgcctctctctttccctttttgcctgtctctctctctttgactctgtctgttctgtcagtctttctctctcctctaagttttttttttctttacttttgagtctcctggctttactctttcatactctatatattgcctggagagtgggggtctaggttctttttttttttttttttttttttttgagacggagtctcgctctgtcgcccaggctggagtgtagtggcgcgatcttggctcactgcaacctccgcctcctgggttcacgccattctcctgcctcagcctcccgagtagctgggactacaggcgcccaccaccatgcccggctgcttttttttagtagagacggggtttcaccgtgttagccaggatggtcttggtctcctgacctcgtgatccgctcgccttggcctcccaaagtgctgggattacaggcgtgagccgccgcgcccagccctcagtctaggttctttataggttctggccccctgggtactttgttgtatggtagacagcagaatttttgccttctgcttttgtttttcatcatcttttcttatatataccttttgggcttctcttagaagctcttctataggtttatctttccagttctctatcttttgtaatttcttgttaatatctggccaactgttagtgacaaaatgaagttttaacattccctgcccaagaggatccttgagacctagaccagtgtattttctcatttgttcctttaatctatctaaaaattctataggcccttcatctttcccttgctgtatatcaaatattcgggtaagatactgagttcggggtaccaattttttttttttttttgagatggagccttgctctgttgctcaggctagagtgctggagtgcagtggcgtgatctcggctcactgcaagctccgccttctgggttcacgccattctcctgcctcagcctcctgagtagctgggactaaaggcgcctgccactatgcccagctaatttttttgtattttttagtagagacggggtttcactgtgttggccaggatggtctcgatctcctgaccttgtgatctgcctgcctcggcctcccaaagtgctgggattacaggcgtgagccactgcgcccagcctcggggtactgatgctttaatcccctttattatcaattccttaaggtcctgcatattttctcggtgggctgcgttgttattgtcccactgggggtcttgggtgggagttttttgatctgctgtaggaacgttttggccaggagggtgttcgtgttcctaggctcccatagcagctctatggatcatgtctctttcttcccccgagaagaggggaaagggaaattctgaatatcttttttacattgctctatctcacgttgaagtcctttaagggaaaggtacttaggtcggtagtgagtgggctcttgggacgattctcaagaggcagggttgtaagaaaggggacatcagagataggagaagggtctgggacagcagctgcttttgtttttggtcctttcattatccttctaacattttaacattaggcctgggggaatattactgttgctagctttctcctttttatctcttaccttacttggggcatttcccatcttgggtcctggttaagctcaatctcccctgttggagatgtctcgcctatcctttagccccacctgctggaggctccttgcattcatgcacactttcaacccccagaatatcctgaccaccaaggaaatactttgtcacccctgcgatgtttcttagcttggtctctgcacacttacttggtcgctgtggtacatgaggatcctttcccccaggtcgccagcccgtttctttctgccttgctgagagtataggtttattcgtcacactggttggtctcgattccttacccctgtggccaccgcaacaaggcagtgggacgtgcctcctcatgggagaggtctagaccctcctcagaggaggatgggaatcccaaatgagaccccaaatttgttagaaataaattttcagtgccacaaaagaaatagcactcaaacatacattttctcagcaaggcaattttacttctatacaagagtgcgtctcatggatggtgcaatggcgagagcacaccggaacaagggaggggaatgggttcttatccctgatgcaggtaccccctactgctgtgttgttcccctatgggctagggttggaccgcacaatctaagctaattctgactggctattttaaagagagcaggggtataagccagagtggtggggtgagaagtttagacaggaaagatggttacggaccaggtgactaaaggtgactcaggtcagagcaggtgacagaggctaggaggggattgtttactgaaactaggggcaaggagacataaagaatgaggaaattaaaagttaaaatgaagaacaaagaacaggtgagctgaacatactgatacattggttctttggagaggatctcagaactcaatgtacttaacaaattacaggctaaaacctttgaagaagaatttatgatatcctacattatcatggggtaaacaattcgtccctgacagaataaggctactggagttctcttcttgtaactctgggaaggactagagggaactgtgtctgcagtggggccaggtagttaaaaagtctggactgggccgagcgtggtggctcatgcctgtaatcccaacactttaggaggccaagacaggtggatcacctgaggtcaggagttcgagaccagcctggccaatgtggtgaaaccctgtctctactaaaaatacaaaaattagctgggcgtggtggcaggcgcttgtaatcccagctacttgggaggttgagggaagagaattgtttagacccgggaggcagaagttgcagtgagccgacatcgtgccattgcactccagcctgggtgacaagagcgaaatccattgcaaaaaaaaaaaaaaagaaaaagaaaaagtctggaccaagccaagaggggaagaggacgtccccatgaaagagctttggatccagaaagcccgggttcttggaattctttttctcttttcacttttgttgtagcatactttgttcttttttattttttatttttttgagatggggtgtgggggctttactgtgggtcttgctttgtcacctaggctggagtacagtggctcggtctctgctcactgcaacctccacctcccaggttcaagcaattctcctgcctcagcttcccaagtagctgggatgacaggcatgctccaccatgcccagctaattttttttaccgttagtagagacaaggttttgctatgttggccaggctggtctcgaattcctgagctcaggtgatcggcccactttggcctcccaaagtgctgggattacaggtgtaagcaactgtacccagcgcatgttttattttaatttaatttaattaacttattttttgagatggagtttccctcttgttacctaggctggagtgcaatggcgcaatctcggctcactgcaacctctgcctcccgggtttaagtgattctcctgcctcagcctctccagtagctgggattatagacatgtgctaccacgcctggctagttttgtatttttagtagagatagggtttctccatgttggtcaggctggtctcaaactcctgacctcaggtgatccacctgcctgggcctcccagagtgctgggattgtccttggaattctgagtggatacatgaagagttagtaagaaccagtgaaaaagcaatcacttatgatcctgggctttgaaaaatcactgtgattatcttatgcacttacaaatgagactaagacgcctgatgggaaagtgcagattgctggtgaggaagggcaatgaagaagagactaggaaccaaattcatcatcattatcacacaaaggcatttggaaatgtcaccttacacatggtgagcacatatgggtgccagcccgagacagcaggataagtttcacaaaacttgaccaggcaggttagaagcaaggcatggttcaggatggcagagggcagggagacagaagggagtaggatgggagagaagagccagctggaagatgagtcagggggtgcaactggggagagcagctctgaatcctgcttctcagtgagaaagttgctaagatggctttgcagggagctgtcctatcgctgctcgagatcagcctgctgggcctatgatgataagcagggctgaccctcttgggctctgtagctaagcccaaaccctgctgaaaatggggcggggaggttgaggcagtgtgtggcaagtgacacagacggggactcccagctgggggtccctggaattacttgacatcccacagctggtgtcttcagcagtcatctggggcaacaatcccacctgcccattgtggttgttgaggatatcagagcttttgttttaaagcgcttgccacaaactcttaagatgcggatgggtttcccctgtgaagcactccacaggcgggatgcaggcccatctgaggaggggcttggaaggaagaggagcacttgagacggggcagaactgggctggcctggggctcagcgacagctccattgcagacaaactgggctggggaaggcagctcccacctggcagaggatgcccttctgccccctgacaggagggaggagaccaccgcatccccgactttcagccctcacgtgccatctggtggctttgctgcagacactgccatgatctgagtggtctttggcaatcacgcattggcgggagtgtgaggttgcggggaaagagggactgaccatgggcctaggtggggaggcctggccactgtgcccacagcttaggaagggacagtcagagctcctctttgttgctatcgacggactgagccagaggccctggagccaggggggaacctagtggctcttggtcgccaagctgctggctgctgtcctccaggcgcctgcctgtgggggcatagtcccgcaggagcctgctctccactctgtgctgccaaaggctctcggtactcacgagtccctgcatcctcaggtacccctgctggcaaaagggtggcaacttctggcgcgtgagggcgaacaggaagcaggactctacacaaaagcaaaatgaggagaatgagccaggctgggacatgtggggaggggtgcagaaaggggagctgccaatgccaggtgtgggggcttcactgcaggccttgcctggtatcttccatcccttgaaactgggagctgacctttctgggcatctcacgtccaacctgagtaggtcatgaatcatgaccctccacgaggctccagggcagggggctgccttgacactctggaagaacaaggctccaaaataaaagcaaaccacagcaatgcctcagctcccagacatcagggctgagcaccgggctctgcaggcaaccacactgggggcggggctccgaccttcatgagcagaccctcggcctggtgcggctgggaactcagtggtcagttccactgtgagctcagatctgcctgcaaagacgcagtccctcaacaacatttgagttgcaaataccatgtgcaaagttctgatctaaacagtgtgggggataaagaaaaacgggtatatcctcatctgtcccacaacagaaagctggtgcatgaatcaaatttggtcaatcataagatagctgtggatacttatcatgtagaaatatgaagaaacggccgggcgtggtggctcacgccttaatccgacaactctgggaggccgaggccggtggatcgcctgaggttaggacttcgagaccagcctggccaacataatgagaaagaaaccccgtctctagtaaaaatacaaaaattagccaggcgtagtgacaaacacctgtaatcccagctactcgggaggctgaggcaggagaatcactcgaatccaggaggcggacgttgcagtgagccaagatcgtgccactgcactccagcctgggtgacagagactctgtctcgaaaaaaaaaagaaagaaaaagaaatatgaagaaacaaccaaaagaagccatgcaaagagagaagctactgaaaggaacaaccgctaggtctgggagttcctcgtgggaatgagaatgaaggtagggaaagcgggtgacatagtttgggtctgtgtccccgcccaaatctcatgttgaaatgcaatctctaatgctggaggtggggctgctgggaggtgactgcatcacaggagtggtttctttttctttttttttcttgaggcagagtctccctctgttgcccaggcaggctggagtacagtggcacgatcccagctcactacaacctctgccttctgggttcaagtgattctcctgcctcagcctccccagtagctgagactacaggtgcccgccaccacgctcagctaatttttgtgttttttaagtagggagagggtttcaccatgttggcctggcttgtcttgaactcctgacctcaagctatctgcctttctcggcctcccaaagtgctgggattacaggcgtgatccagcatccagaaatagatgctgccatgcgtccatacagcctgcagaactgtgagccaattaaacctgtttctttataaattacagtctcaggtatttctttatagcaatgtgagaacagactaatacagtgagaaaaagtcatttagccaagtacttataagactttaaacaaacagaagagctgacacagatatgggctcagccttctgagggagttagagacaagggcagacagagtgtcaggaatgggctggagtccttctgtaactctgagcgagccttcttgcctccctgagcccctctatctcaagtgaaaaatgggcacagcacaaaggatgtcgtgaggcttccatgggtgaccaggctgaaaggtgctccagaaatatgacttcctgtttatttctgactcttagcatggaggcccctgggaggccaggccatggcaagcctctccaagcgggtaagagagcagatgaggaagaggacagcgggaagactgggagggcagcaaggtggctgtttggcaggcaccaccttctgacaacatcatcccttctgcagggggctcagatgctcagcagaatctggggccagcactaacagctgcacatcagctacagtaacagagggacggctgccactatgccagctggccgcctgctgggcggattctctccagtccaaggcagcagcacacagtggcctgtacagtcaaacagtgtctagaaagtgggagacaggaggctaaagggcctgggacaatgcattggtgggacccacaactcagggtgggaattcactccctcacacaccctggcatttttgttgttgttggttttgagatggagtctcgctctgttgcccaggctggagtgcagtggcatgatctcgggtcactgcaacatccgccttccgggttcaagcgattctcctgcctcagcctcccgagtaggtagctgggattacaggcacccaccactgcccccagctaatttttctacttttagtagaaatggggtttcaccatgttggccagggctggtctcgaactcctgacctcaggtgatccacccacctcggcctcccaaagtgttgagattacaggcgtgagccactgcacctggcctaaaagtgtatttcttgagaaggtgtgcatttgcttctgtgatttctatagctcaatgatctcatgaagtttggccccaaatttacataagcagggcctactggttgaatattttcagagatttttctctcccactctatctagggccaaaaccatgcatgtcatctatctcctcctttggagggttttggctcccagcttccctactgagatccaagctttattggagtgtctctaaacaggcctcccatcctgctccagctctgtcttcccacccatacctggccctggcgccttcccatggcgcctggccctgctaatccttttgaaaagacatattatcagctgggtgcggtggctcacacttgtaatcccaacacttcagcaggctgaggcaggcggatcacgaggtcagttcgagaccagcctggccaatatggtgaaaccccatctctactaaaaaataaaaaaattagttgggcatggtggcatgtgcctgtagtcccagcttcttgggaggctgaggcaggagaatcgcttgaacccgggaggcggaggttgtagtgagctgagattgcgccactacactccagcctgggcaacagagcgagactccatctcaaaaaaaaaaaaaagaagacatattatccattatttttaggtgagttgtaatttaacccacggcattgtcgggaacagtagtctggggtttggatttccagatatgggtcctgaaactccacgggtcttgggtctctgtgacctttcttcaacctggagctcagaccctttgtctttctgggagcttaagttacctgcatagaagcttcgcaaatcggtgtccaaacagttctccaggaagcgcctcagaggtaggatgtgcccgatcggggcagtccagtctgttaagaagtcttccacgatgtgatggatggccgtgggccgaggcaggggccagtgtgcagggcggaacctcacctcctgttctgtggggaggagagagggggccatgtcagagctgtgaggctgggcttcccctcctcgggccgacacagcacggatcccacacagcccaaacacttccctcgttcactcgtgctcggctttcccgacagcctcctatgctgggctgtggtcagactgttcaagagccacctgcagatatttgaaaggctgccatgaggaagaggaactaggcttttcccttgtggtttcggaaggcagtgctgaagctaacaacgtgaggctggcgtttccctaagactcacatggactgagatctactgtggctgctttttattttgtattattatttgttggagacagtctcgctctattgcccaggctgtcatgcagtggcacaatttaggctcaccgcaacctctacctcctgggttcaagcgattcttgtgcctctgcctccagagtagctgggattacaggtgcccgccaccacaccgagctcatattttacatttttcgtagagatggggtttctagtctctaccatgttggccaggctggtctcaaactcctgacctcaggtgacccacccgcctcagcctcccaaagtgctgggattacaggcatgagccactgcgcctggctgtggctgctttcaaactggcctttctctgagaagactcagatagaggcgaggggtctcagcactcatctagttcagcttctccctggtgtgggctcccttctgtggtgttccagtcagatggccatcgagtcaagacttggccgtcgctattctgggaaacctgaatttggaggtgaccaattcccccactgaacagctttaactcttagtgcctcctttttctttttttttgagacagagtctcgctctgtctcccaggctagagtgcagtggcacaatcttggctcactgcagcctctgcctcctgggttcaagcgattctcctgcctcagcctccctagtagctgggactacaggcgcacgccaccacgctggctaatttttgtatttttattagagacggggtttcactatgtcggccaggatggtctcgacctcctgacctcgtgatccgcccgcctcggcctcccaaaatgctgggattacaggcgtgagcgaccgcgcccggcctttttgtttgtttgtttgttttttttgagacagagtcttgctctgtagcccaggctggagtgcagtggtacaatctcggctcactgcaacctctgcctcccggatcccggttcaagcaattctcctgcctcagcctcctgaatagctgggattacaggcatgtgccaccatgcccagctaatttttgcatttttttcatgtttttttagagatggggtttcaccattttggccaggctggtcttgaactcctgaccttataatccgcttgccttggtctctcaaagtgctgggattacagtcatgagccaccatgcccagcctcttagtgcctccttatactgaccacagacctgcacccgtcactgctacctgctgacacgacttctgcctttgggaacaacccctgtttaaaccaccctcttctacctgactgcccttcaagctctgaagcagggggtgcgttcccgaggttgttcacttattggtagctactctgtgcctgcagtgggctggcattctgtgtacactgtcaggtttaacctcatggaaccctacaagaaaggtactgttgtaatccccattttacagaggggaggttgaggctcagagaggttaagtaatggtccaaggtcacacagtgacaaaatgacaggcctagggattttgcccagtttctctgtactgtgttaaccagctccagttccctctactcttcagacccctcccgccccaccacagtcagccgcctctggagacctgcagcagggccgtgtccctcttactacacagtgcctggcggagagcacgacaccccccgcatggcctgtgccagtcacggtatgtgtcagaatctggaagcatcgttcatcattctcggaccttctgcccaagtggtctctaggcagagtcccgcagccatcccacctgtcagctgagcatgtgtgtgaaggtttcagggtgggtgacaaccttgcagacggtgaggtctgaggagcccacaggttggggaagggcagagacctgctcaccggtggggaggtatctatagtagtagatgacaggatgaagaaagttagactgccaggcatcttctgtgtgccccacagaccggtcatcaaagaagacgtccttgtcggggccagagaaatttctgccatattccatgttgatgacgaagagcccgtgctttgccttcctccctgtgagtgtctccagctgggccagcatctgtatggggaactcctccaggtactcaaaggccgtggaattcctgggagaacagcaacgcgggggaggccctcagtgctgtggcagaggtgaggggtgcagcccgggggtgagcatgtgtgtgtgcgtgtgtatctccccctctaaggagcgtcaatcaagcagcacacccctcacttaacattactttttcagctcagctctcacgcacatgtggggtagagaccagaaaattccatgtaacctgaatgggatatctggggaaagagtgtcccaggcagagagaacagtcaggaaaaagccctgaggagtatgtgagcactttgtgttcaaggaacagaagaggccgacgtggctgaggggagtgaacagcaggcagagggcaggagagggggccggaggccttgagaggtcaaggagggctgcgcctcccatgacgagacgtgaggagtcgtctggcccgagaggtgacactgctggttgcttgggaggactgagcagagctgggatcagcatgcctcaggtttctaaggaccactctggttactgtgctgagaacagacgccaggccaagtggggcggctgttgtatgggtgcaggtgatacagcctggtgatcgggaccgaggtggtggtggtagagcaggtgagagctggttgggctccagacatcatctgaaggcagaggtgacaagacttgcccatggtttgcatgtggggtgttgagacaggggtgccaggcgtgctgactcacgcctgtaatctcagcactttgggagaccaaggcgggtggatcacctgaggtcaggagtttgagaccagcctagccaacatggtgaaacctagtctctactaaaaatacaaaattagccaggtgtggtggcatgggcctgtaatcccagctactcgggaggctgagacacgagaatcgcttgaacctgggaggtgggctgcagtgagccaagatcgcaccactgcactccagcctgggcaagacatagtgagactctgagtcaaaaaaaaaaattagccaggcatggtggtgggtgcctgtaatcccagctacttaggaggctgaggcaggagaagtgcttgaacccaggaggcagatgttgcagcgagcagagatcgcaccactgcactccagcctggatgacagagcgagactgtctcaagaaaaaaaaaagaggggcaggggcatggagggtgatgcgagggttttgtgcagaaagcggctgcactacctgcatgtccctgaacttggtgtgctatagcacgccctgcctttggatcgggctgttccctctgactgaaggttgctcccttgcttctccctgccacctgtctccccccgcccctcacccctctgtgctctgcaccgtttccttctcaggaactgtccatcctctgggatctgctgcttatcactaaattgactctgacgatggtggccggcaaggccctggcctgagggagctctgagatccacgtggctgcctctgactactgctcatccacgtgatgccaaacactttccacaagtgacctttactccttcctttactgctgcaaggtaggcacaattatccccattttgcagatgaggaagaagggctcagagaggctcactaatgtgcccgtggccactcacaggactgtctgtagagttaatgtcattgtttttccccagaacaggcatgttccccacagcagccttcatcttaggaaagaactgggcacctcacacctggaataggaagagaagcgctatgcagcacgtcgggaaagctgggccgaggggagtagggtggggacgggctactcactccttcaacaggatgacatcggccagcacaccgaacatctggtagagcccagaagcctcattcacgcgccgcacgatggagctggtcagctgtgtgatggggagctcagtggcgggccaggtgacgctgtggtggcggtgctccaggagccggtgaacagcacgcactggaacagccagagggaggaacggcacgctgcacttaccattttatctctggtcactgggagggatgcccaggcctcattgacccctgagaacgccatacacactggtctccatggcccagcgcaaacgcctaggtggtgaacacatgaggggaggagatggcagctgcctttagagcagggccagcaggtattttctggaaagggccagacaatccatattctctgctttgtgggtcatacacgactcagtgatgctgctcaattctgcccctagtgtaaaagcggccaagacaacaggcaaaggagtgagcacagctggagttggtctccaggccagagtccatctgcccctgcttcaggccatctgcacgtgggagtcccaccggccccacctcacacaaggaacgtcaagtccaacacggagccttccccagaaacctcccccccttcacagctctgtttccatcagagacgcgcctacagaaatctttgatttcgccctctctttcacagcctaaatccatctgtctctaagttctttttttaaatattttttattttatttttttgagacagggtctcgctctgttgcccaggctggagtgcagtggtgcgatctcggctcaccgcgacctccgcctcctgggttccaggaggaaccgactcccagaattgagtccaatcctttgcccgtactgtaagacccctctgcagtggtccctacacttattattgtagtcctctaacctggaataaagtccaccttaccgtcttcatttgtattatgatttttgagacagagtctcactctgatgcccaggctggagcgcagtggcacgatcttggctcactgcaacctctgcttcctggattgaagtgattctcctgcctcagcctcccaagtagtagggattacaagcctggctaatttttgtatttttagtagagatggggtttcaccatgttggtcaggctggtctcgaacttctgacctaagctgatctgccagcctcagcctcccaaaatgctgggattataggcatgagccactacgcccagcctgccttactgtctttaaaaagaaaaaagaaatataaatattgaatgtctttgagtggcagaatataaagattactccccgtaattccctacattttcacatttttgatgctcaggctaggcatggtggctcatgcctgtaatcccaacactttgggaggctgaggtgggtggatcgcttgagcttgggagtttgagaccagcctgggcaacatggcgaaaacttgtctctaccacacaaaaataaaaacaacaaaattagctgggtgtggtggtgcacgcctgaagtcccagccactcagaaggctgaggtgggaggatggcttgagtctgggaagtcgaggctgcagtgagccgagatggcgccattgtactccagcatgggaaacaggaagagacgctgtctcaaaaaaaataataatactaattttttaaagctcagctgtaagattatgactccattctttcaaatagactcacctaaccacctaactgaatactgtatgcctcactgagtgaatttcaaccaacaccctgtccttctcagaaggttaaccacaggagcaggaacatctaatttttatttatttatttatttttgagacagagtttcactctttttgcccaggctggagtgcaatggtgtgggcttggctcactgcaacctccacctccaaggttcaagtgattctcttgcctcagcatcccgagtagttgggattacaggcgcccgccaccatgcccggctaattttgtattttaagtagaggtgggatttcaccatactggccaggctggtctcgaactcctgccctcaggtgatccacccacctcagtctaccaaagtgctgggatgacaggtgtgacccaccgtgcctggccacatctaacattttagactcctctccacagaaagggcaccagtttgctttctatgaaagaagagaagacctttgtagaaagtgtctttcaggaaagctcctgggccttggagtttaattcccataatggtgagaaaatcaccaaaactctgagcctcagagttttacactcttgaggaaaatggagatttcacacccacctttcggggtgctggcggccctgccagggtcgtgtgttcagtgctcagcccactgaagtcacccaacatgcgtgaattcatctctctcacttcctttttatttcccatttactcctaaaatcacaagtatcaatttttggttggggattattttagtgcaataaatagaattatgtttttaaaagatattttagtattttctttgtaaacattctcaagttggcagaaaatttatacccttggtactgagagttttgaaaaagaactgatataatccaattacatttttttttttttttttgagatggagttttgctcttgttgcccaggctggagtgcaatggtgcgatctcagctcaccgcaacctccacctcctgggttcaagtgattctcctgcctcagcctcccgagtagctgggactgcaggcgcacgccaccacacctggctaatttttgtatttttagtagagacagggtttcgccgtgttgcccaggctggtcttgaactcctggcctgaagcaatccacctgccttggcctcccaaagtgctaggattacaggcgtgagccattgcacctggcctacacttaattttattttatttttgagaccaagtctcgctctgtcacccaggctggagtgcagtggtatcatcatggctcactgcaaccttgacttcctggactcaagggatcctcctgcctcagcctcccaagtagctaggactacaggcgtggacttttacactttatctgatactttcctaaacatgtcgtcagaccacaaaaacctgttgtcacttccccaagacaatttatgacaatgagctactgacaagcaatcccctaatgcttctggacataggagtagatttataaaccctgggatgctgagagtggttccgtctggggacagttctgccttctcagctgggctcacctgtgtatcggaatccgtggatgaagcccccagcagatttccggtagtccaccgagtggctggcagtacccaggataaacagaccccggcttcctttggattcgtagctagctcgaatcagcgggtacttcttgccgaatgcatttcccgagttaagtctgagggacctgtcagtggaaagggctgttcatgaaaatagctgctatgtaagaggcacttatttatttagttagttttgagatggagtttcgctcttgtcgcccaggttagagtacaatggcgtgatctcggctcactgcaacctctgcctcctgggttcaaactattatcctgcctgagcctcccgagtagctgggattataggctcctgccaccatgcccagctaatttttgtatttttagtagagaccaggtttcaccacgttagccagcctggtctcgatgtcctgaccttaggtgatctgtctgccttggcctcccaaagtgctgggattacaagcgcgagccactgcacccagccaggaggcacttattacagtggcacttattactggcactgagtgccttagatttctcgtctcatttaaacctcaccatgaccccaggaggtgggtattatcatctccatttaagagatgaagtcggccaggcgaggtggctcacgcctgtaatcccagcactttggtaggccgaggcgggcgagtcacaaggtcaggagttcgagaccagcctggccaacacagtgaaaccctgtcgctatgaaaaaatacaaaaagagttagctgggggtggtggtgcaatggctgtaatctcagctactcaggagactgaggcaggagaatcgcttgaacctaggaggcagaggttgcagtgagccgagattatgccattgcactccagcctgggcaacagagtaagactctgtctcaaacaaacaaacaaacaaacaaacaatgaagtcaggccaggcacagtggctcacgcctgtaatcctagcactttgggaggccgatggaaaggagggtctggacaggcacaccagcttctcctttgtctttctgcaccctggtcagaagacaagtgaaagactggatgctgctttgataccaaacctcccgaggtagtcggcagcaatgtttaaaatctaggcttcataaaatagcccttcaaaatacaatgataaataacttaagcaactaacattttattgagcacataatacatgccaagtactttctttattttaagagatagggtctcattatgttgcccaggttggagtgcagcagctattcacaggcatgatcatagcacactgtagccttgacctcctgggctccagtgatcctcctgcctcagcctcctgagtagctaggtactcatcactgcacctagctcccagcactttctttcctttctttctcccctctctctccttccttctctcctctctctttttttgtttttgagatggagatcttgcactgtcgcctgggctggagtccacaatggcgcgatctcggctcactgcaacctccacctcccaggttcaggcgattctcttgcctcagcctcccgagtagctgggattaccggcacgtgccaccatgcctggctaattttttgtatttttggtagagacggggtttcgctacattggtcaggctggtcttgaactcctaaccttgtgatccgcccacctcagcctcccaaagtgctgggattacagcatgagctactgtgaccagccatctctttttttttttgagacagggtctcactctgttgcccaggctggaatgcagaggcatgatcttagttcaccacagcctcgacctcctgggctcaagtagtcctcccaccttggcctcctgagtagctgggaccacaggcatgtgccaacacacctggctaatttttgtattttttgtagaggtggggtttcaccatgttgtccaggctagtcttgaactcctgagctgaagtagtatgcctgccttggcctcccaaagtgctgggattataggtgtgagaccatgagccactgcacctggcctctgcacacattcttctttctttttttttttttttgagataagagtctcgtcacccaggctggagtgcagtggtgtgatctcggctcactgcaacttctgcttcccaggttccagcaattctcccacctcagcctcctgagtagctgggattacaggcacccaccaccacgcttggttaaatttttgtatttttagtagagatggggtttcaccatgttggccaggctggtctcgaactcctaacctcaagtgatccacctgtctcggcctccctaagtgctgggattacaggtgtgagccaccgcacccagcctccaagcatattcttatgttaatcctcgcaataaccatatgagaaacaaactttgaatcccattttagacatgagaatactgggccacagcgtggttaaataacttccgccgaggtcacagatttggcaagcagagaatctcaggacaattccggcacctgtgctctcagccactacgctatattgccttcgagcaaattcccctctgtattctctctgagccggcctttccaactcacaggtggaggctcccaatgctgatgaagatctgctggtgttgctccaggaccaagggcctcagggccacctgggaccctcaatggtcagagctcatgtcctggagggaaatcaggcagcactcacatccattctttgggtgctgtcctgagagctctgtcgccagcctactgaacagccaccctgttcccctagggaggggtcaggagggtttgctaggagagcccacctccttccgcatggaactcacttattgaaaatggagaagtcaaagttccagcccaggcagcggattacccggtcatagggcacgcgcatggcaaagttgtcattgtcgtcctgggggagggtgatggagtcggcactctggttggtgttggcttcttccaggaagaatttcggggtgacatggaacttgcctttgctgtccttcaggatggccagatccgtcaggtcagactcgagcagcccgtccagggacttgagctggtaggtatccagcaggccattgttgatggctctgagcccacagagaatgcaggggagagagactcagaggaaagctgggcagtgcagctggggtcaggaagggcaggggagggttggggaggctctttccacactctgggctcccagcacagaacacacatgcggggatgtggcctacctgaggtctccaacgtagtgggtggcccaggacagacggacccgggagcggctgagcatatggataaagtttgtgacacccaagatgttctctgctgtctcaaaggccgagttcccacgacccaggatcagcacattctggcctacaaagtcctcagggtccacggacacggactcgtaaccctctgcatattcggagccagggaagtcaacctggttggggactgataaaccagtggctacaaagaggacgctgcaggcggggacagaggaaagatggcttagtctcttagctataagaccactaagtgaaaaccactccctggacccacccacccacctgcctggctccaaccgccggcccctaaaagaaaataggacattcattcattcatttttcattcattcatctgtttacgccctcatcccagtgcacttgagaggctctgcccttgcctctccctgagctcacagtattttccctagcactgtactgggggttaaatttgccctgtgagagaggagaagatgacagtatgagaaatggagaattcacctaactttgcacatagcagtcagaccaggtatgactgctggtgatgaaatgaaacctgacattctactttcccctttctgagtcctctgacagatacatctatccactgagcagtaattctgtaccaggccctgtactaagtgtatctgtgcaccatctttctgactcctccaagcaacctggaggtggtatgtggcctgctttacaggtgaggaggcacaggccctgcaggcccatggcttgagagctcctaaaagcagcagagccagagtctaaacacagataggcttgattccaaagtcctgctccttccattggtgaggatcgccatccaggggagggcagctggggacttggatcctgccggcttgcagaagaatgctttgatcacagagtggtttcaaaaatagaattgaaggccgggtgcggtggctcatacctgtaatcccagcatttggggaggctgaggtgggtggatctcctgaggtcaggagttcgagaccagcctggccaacgtcgtgaaatctcatctccaccaaaaatataaaaaaattagccgggtgtggtggtgcttgcctgtaatcccagctactggggaggctgaggcaggagaatcgcttgaactagagaggcggaggttgcagtgagctgacctcgtgccattgcactccagcctgggcgacagagtgagactccgtcttaaaaaaaaaaaaaagcgaaataccctttttcgtccattcctcccatacctactggccaatcaaggtgtgtggttcgtgtggggaaggtcccagcttccgcaggtgagctctggcaccggccttacctgcactgatgcacctggcccttctggtcagttaggatgaagtagtggccattccaggcctgtcggtccttgtccagagtgacgtgggcgatggtggtgttgtactggacacggagccccagcgtgtccgcgaagtcacccaggtagcgcaccatgtcgcgggcgtcggggaagtaggcacgcgagtagtgtctgaagagcagccgggggtcgtggctgagcagagagttccagtcgtggcggaggttgaactcggcgttagccttgcccgtgtaccgcttgttgatgctgatgagcttgcggtgccgcgggtagcgtgtgaagaagctgccgggccgcggggcccgctcgaacactgcgtagtcgcgtccagcgcgctgcaggaagtaggccatctgcaggcccgcgggcccagcgcccagcacgcagtagtcccggcgcgggggcaccgacagcgctgggtgcagggcgatggccaggagcagccccgggggaccccacaacggggccgcagcggagaggcccatcctgcagcagatcagaggggtaaggcctcgcacccggcccggcggctgggagacacgaggcccagaaagaggcggggcctgcgggaactctcactgcaatctgggtcacggccaggcccagaagccgtcctcagagctcatttgcccggactccaccgtttcaagctgggacttggggctccccggaatcccgagcccctccatcttatctccctcagggtctccttcctcaggggcaccggctccccgcttatgattgtagtaacctccaccctggggaaggagagcgtactccccaattttcccctaatttgagggtgcccaacacccctttgaaccaccctccaggttggaccttccagaggccttggcccctctccagcgaccgggtgggagcctgaagtgggtgtggcctgcgtgcgccccgccccctgccagggtccgcgcgccccaggctcttcggccacgtgacagggatgccgcgcacacctgccgcccgcccgcgtgcgcttcaggagccgccaggtccctacgcccgcagctccggcctccccgcctccgaccgaaccctgagaaacgcgcgaacctcccagccgctccggctgcaacccgtggtctaatgaggccgcgcttggctcgcttgctccgcggcggctccgcccctcgcgcccggaccaatggcagggggcggggtcacgtgcgcggcgcgcggcacgccgggaccagctggcaggctgcctgctccggcccagcgcgggagaggcgcgcgcgtgctgcgttcgctgctccgggggctggtagaggggcctggggctagcgcgcacccgcgagggtggaaggtctggagatccgggatggggaactgggtccttcgttttaaaaggtgcctctctacacggagggaggggagcacgtgatttttggagctaatcctagctctcatattccatgaatgtagccaaacgctaaaactagttggcctacccagttttgtgggactggaaaccagcgtggtggagccaggaccgataagccaattaacaagcgtttgctacagtgactcagtgtactgcttaccaagtaacatacacgactgtcctaatcttccaccaaataggagaggtgggcaaggcattgtttccgacatttggtagctgactggtcaaatggagacatagggatgaagggatatgtttacaatcacaggaagtggagcctggaattaaaactcagtggaggcaagataaatggcaggaggaagataacgtgaactggatgatgaaggttggcttcccaggggtggcaagtggcccctgcatgagatttacatggggagaaatacgaagtcagtgtaggaaccttcaaagtccagtgaaatggggctgagtgttcttgggggaagggcaggtggaaagaactgcgagcctgcagatttgcatggctggagattctttgaattaaaaatcgtagctggggactccttagaaaaattttcctgacctctcaggcctacaagtacctaccaaagaatgtcatttactttttcttttttttttttttttgagatggagtctcactctgtcgcccaggctggagtgcagtggcgtgatctcggctcactgcaagctccacctcccaggttcacgccatttttctgccccagcctccctagtagctgggactacaggtgcccgccaccacacccggctaattttttgtatttttagtagagacagggtttcactgtgttagccaggatggtctcgatctcctgacctcgtgatccgcccgcctcggcctcccaaagtgctgggattacaggcgtgagccaccgcgcctggccgaatgtcatttactttcttcagtctgtgtcaacatcagagaaaagctccctcagagcagaaattgtccagtatctgacatacggaagtttaagcatttgttgaataagcattgcaaccagagaggtcaggcagaatactttgccaaaaataaagtagggatgtcttatttcttctttttgagacagagtctcactgtcacccaggctggagtgcagtgacacaatcatggctcactgcagccctgaccttccaggctcaagcgatcctgcttcagcctcccaaagtgctagggattacaagtgtgtgccatggcccctggccaatttttcaaaaaaatttttgggggcatatgtgtatatatttatggggcatatgagatgttttgatagtcatgcaatttggggatgtctgtttcttagtggttgtgaagattatgagaatgggtgctggcaaacaagttcctaaaataattgctggtcttatgtggtgaatacagtagtgggaaattaaacagaattcgtcaagtatggtagggccctacgagtaggctgaacctagattgtaagcaacaggatgctactgggagtttctgaatgtaggattactgcagcagtcaacttggtagccccatgcaggacagataaaagcagtggacagctactcgggaggctgaggcaggagaatggcgtgaacccaggaggcggagcttacagtgcctgagattgcgccactgcactccagcctgggcaacagagcaagactccgtctcaaaaaaaaaaaaaaaaaaaaaaaaggcagtggaaactgatgcaaagtattttcagggaatgagcttgagtcacttccacttgcttctgttaatcctgttggacagggccatggtttgcaagaggcaatttggtgaatactggtccaacctggaaacccccggcactagtcacaccactttaatctgttttttaacactctgtattcacattgaaaactccccaagtacactttttctctccactgcttctaacacagttcaagaaaccttttgcttgctgaggttcgattcattaaaattaattttgtgttttttcaagctactttaaaaaaaaaacctgtaactttagaaatgctgagctttttttgagagtctctgtaatccaaattggagtgcagtggtgtgatctcagttcactgcaacctccgcctcctgggttcgagtgaatctccagcctcagcctcccaagtagctggaattacaggcgtgtgccaccatgcctggctgttttgtatttttagtagagacggggttttgctatgttgctcaggctggttttgaactcctgacctcaagtgatccacccacctcggcctcccaaagtgctgggattacaggcatgagccactgcacctggcctttttttttttgataaagggtctccttctgtcacttaggctggagtgcagtggtgtgatcatagctcactgcagccttgaactcctgggctcaagcaatcctcccacctcagcctcctgagtagctgggaccacaggtggaagcatcatgactggctaataatttatttttttgcagagacaggccctggtctccctgtgttgcccaggctggtctcaaacttctaggctaaagtgatccttctgcctcagcctctcaaagtgttgggattagaggtttgagccaccatgcctgtttcctcacctctacaatggtactactcctgccagcatcacagttctgtatgaggcttagatactacagaaagctcagcattaatacctggcagggtaattactccatcaagtgtccagaacagaacagtgtccacttacatagtttacatagcctcggctgggtgcggtggctcacgcctgtaatctcagcactttgggaggccaaggcgggtagatcacctgaggtcaggagttcgagaccatcctgacccatatggcgaaaccccgtctctactaaaaatacaaaaattagccaggcatggtggtgcatgcctgtaatcccagctactggggggctgaggcaggaggatcgcttgaacctgggaggtggaggttgcagtgagccgagatcatgctactgcactccagcctgggcaacaaagtgagattccgtctcaaaaaaaaaaaaaaaaaaaaaaaaagtttacatatcctcaacatgcagagctcttatgacacaatgctttgtagggacaggcctgagtgtcaccagcccaagccaagcttaaaaacaattcataaaccattacacaatcacccagtgggacatccatcaagctctctgtggcagcctccctcaggcgcagcagccccacctcacccacaccctgcttcacgctgtactagtgctctgcactccagctcctcacagtgaactctccaaaagcaacaggtggcccttcacacagccagcaggcactcatgcttgtggaaatggacttcttataacaaatgaggacacccagattctgaattccacatagaaattgctgaatctcatccccactctgtcaggaatctttgaagaaacgactgtaaatcgttaatgcaggcagacgatgagggaaagactaaacagatatatattttatttcatctgctaaatgtcagagagcaagttagacacacattccactaagcatcaaaggccctcgtagtctcggtggaaggacaaactccagctccacatcactggtttaagtttcttcctctgaaagacacaaaaaatgtaagagaaatgagccaggttgtgtgatatgatgttcactttcctttctgaacctctgctggactgtgcgtgagttttcaacacttccattccgaagttaagcctttcagatgctcacagggctgggcaggtatttccttcagtcaccagctggtggagcaggagagacaactttcaggctatttaacccggagcggagcttttccctctagaccaccggcttcaatctgggacttccctcatcttcctctacctctgccacagtccagccgcttctctaaaacaccgctatcctccccaaccacttgatgtgatctaaaggctctagaagaagctcttggagccaaagtgaatgcttcttcatacttaagtctcagggaattctcgaagttttatcaaggttaaagatcacaatggctacagagcttgctcccgtgctagcccacagatcactctagacctcagaaagtgggctgctacacaccttcttcttcctcttcttcctcctcctcttcctcctcatcttcatcagagctgaaggtgccatcagggaggctgtagacacggatgacctgcttgttggggtccttgaggatgaggtatttgccctcctccagcttcatgcagatgtcaatgacgcagcgtaaaatgccccaggcattctccacgctcaggttgatctggctggcaaactcattaggcttgaactgctgggtgcctaggatgacgtggcgtgaggagtctttcacgtggtaccgagacacataactaacaggggaagggatatcagtggtcagagcagggcagcacagagacagcaacacttgggatcaaatgtcaattaaatggtgatacctggtccactgctattttttcttttttttttttttgagacggagtctggctctgttgcccaggctggagtgcagtggcgccatcttggctcactgcaagctccgcctcccgggttcacaccattctcctgcctcagccccctgagtagctggggctacaggcgcccgccactacgcccggctaattttttgtatttttagttgagacagggtttcatcgtgttagccaggatggtcttgatctcctgacctcgtgatctgccagcctgggcctcccaaagtgctaggattacaggcatgagccaccgcgcccggcagtccactgctattttcaagggaaagggaaaacatcgtcttctgagttctcagttctggatttcattgacaccattgccctagttcaggactccattcagcatgcctgctgtttggcatttgtctcctaactgacccctccatctctaccccacccctggatttatctctgccagtcaattgtccagtacacggggaggggagggtcaacctccctacccagacccttcctttcacaagatcagctgccagctcctgcacaggaatctcacccaagcttgaggtactcagatccagccagcaaagcacagcaggtccaccgggccaacttgtagctgttgttcttcagctccgtggcaatgacagcccctcgctgagagtccagcttctgacgccagtcaacgccattacagtgctgcaggagagccccgttagagaaacagaagcaagctccaaatgcccaaggtgctgggacctcctctggcagagaaggaactccctagtctgcttgcttagaaagtgggtaggtacgcactaaatcttaccatttaagagacaaagacatagtcccttcccttgcacagcctgccgcacagcagtcactcaacgacttacaattcctctcttctaaaagctcgcctagacagggaatgatggatggacacacacggacacacacacacacacacacactttagaagtgtcatataaacagcagagccaagtgtttactatgtgttgcgtggtaaggaagggcttcacagaggacgtgtaacagtgagccaagtggagaatattggctcaagtgcaggtgtagccaggaggtcttgatctgagaggcatggtgggataggaaagacaggcagagttggccttagatgggggtggaagcctgcagtgggtgcaaagctgagtctgacattttacataaatgcacacacagtagaaaaggaccccagagagatcctcttttctacccatatcatttgtagacgtgggaagttggacccagagtgaaatgactggtcaaaggtcacatgacagaggttcccaaactttcttggttcatggcaaacacagggcaaaagaaatactcaagaatttcttttaaattttttttctttttttttttgagacggagttttgctcttgttgcccagggtggagtgcagtggcacgatcttggctcactgcaacctccgcctcccgggttcaagtgattctcctacctcagcctccctagtagttgggattacaggtgcccgccaccatgtccagccaatttttgtatttttggtagatacggggtttcatcatgttggccaggctggtctcgaactcctgacctcaggtgatccactcgccccggcctcccaaagtgctgggattacaggcgtgagccaccgtgcccggccaagaattccttttatttagttagggtcaaaccatgtattagtattctgacaagatgtctctgtgtttccctaaaaaatttaaaatatcctgcagcactcctgtgagtttgctgtggcacattttttggagatggggtctcactatgttgcccaagctggtgagttcaggatttgaactcatgaacccaagcgattctcccacctcaggctcctgagtagctaggactataggtgcatactactgcatacagcttgctggggcatgttagaattcttctcccaatctgcactgctgatgaagcgtgtattggacaattgactggcggagataaatcaaatatagaagttgggtggaggtagagaaatcagttaggagacaaatgtcaaacaggcatgatgaaatggggccctgaactagggcaattatcagtgaaatccaggacagattcagaagacagcaaagccttctattttgctaacagcaaaacagaataatgtaaaaaagaagttggagatgttggaggctcagagcttaggtggaagaaagacaatgctgatggacagctggcccagaggcaatgacgggactggggacacatggaaggggaaggtgttttagcagaaaaacaatgggaagtataataaatcagagtagatttgagaaatcattttcaaagagttcatggttgaggcctgggatgggcagaattctaagatgacccccagtgacccttgcccttgcagagtctcctccccttgactacgggcagaacctatggctaggatcaagtatcacccccatgatcatcctaccttgtatgtcaaaagggattttgcagatgtaaggccgcaaatcagtttaccttaatatacactacctggctgggctcacccaaccgtatgagtctcttaaatctaggtgtagaggtcggagacggaggaagtcagagatctgaagcacaagaaggatctgatgtgctgttgctatcttggagatggagggggccatgtgacaaggaatgcaggtggcctctaggagccaagagaggctcccagctgacaactggcagggggatgggggcctcagtcatctaactgcagggaaatgaactttacccacaataagaatgggcttggaagtggcttttctttcagaacctccagatgagaactcagttctatttctattgacaccatgatttctgccttgtttggatttgtggccccacccaaactgcatgtcaaattgtaaactccaatgttggaggaggagcatggtgggaggtgactggatcatgggggcagacttccccctttggcactattcttgtggtaagagtattcaagagatctggttgtttaaaagtgtataccaacctcccccctctctttctcctgctctggccatgatgtgcctgcttctcctttgctttctgccaccattgcaagtttcctgaggtctcctcagccacgcttcctctagagcctgcagaactgtgagccaattaaacctcttttctttataaatcacccactctcaggcatttctttacagcagtgtgacaatggactaatacaaggaccaagcacacagcactggacttctaacctacaaaaccgtgagctaataaattggtattgttaggccgggtgctgtggctcacgcctgtaatcccagcactttgggaggccgaggcaggcagatcacctgaggccgggacttcaagaccagtctgaccaacatggagaaaccccatctctactaaaaatacaaaattagctgggtgtggtggtgcatgcctataatcctagctactcgggaggctgaggcaggagaatcgcttgagcccgggaggtagaggttgcagtgagccgagatcgcaccgttgcactccagcctgggcaacaagagcgaaactccgtttcagaaaaataaaataaaaaataaaagtaaaatacataaatcggtattaagtcattaagtttctgttaatttgttatggtgcgaaagaaaactaatacaaagttatataatacagaagtatgtatggcgaagagagctgtccaggtgactccactgggatcaaaaaggaggggagccagcaaagacgacatgcaaacggaacagggaaacgggtgagaccagagtaacgcggtaacacagacggcaaaacgacacaggcacgacggccctgaatgctttggggagctcaccaggaaaaatccaagaaaaggccgctggccccagagcggcaaaccttccagtgtgctctttcaacaggtgatgtgggcgggggggcggattgggaggggtggggtggaaatagaggaggaaaagtgaaggaagcatgtttctttcaaggtgcctctgaagagtcaattctgagccagatcttagaatccatgagttaaagaaatgaggaattgcaaaaaatgtgtgaaaagattgaaggcagtggctcagtcaatgaaagaagaggtcaaaaagaagagcggccagacttacaggaaaactgccaacccagataataaggagaggaaaaaatcagatgctcagggagcagaagtcaacaggaggccacaatggaacagagatgaagaaagtactggaagaagggagttaactggttcctgcgtaaaaaataagcagaaaagttcttaacacttaacatagttctacacacacagtcatgctctttctcagcaaggaactaagcagaggaaaaaactcacaagacaaaaaaaaacatccaggtagctctataagtaacgaaaggggataagaaacagtttatacaacctagcctgcgtaaacaggcactgtagggaatagagacatggtgtcaccaggagggtgatggagatggcggctcaccctggaatcccactcattgagtgtcttgatgttgatgaaggacacttccccgttggctccagtcatgacgccatcgtgctcacaacggacaataaggtcaatatcatctccaagcttccacctgcggtaactgcagcaaaaaagaaactcatgtggtcactggggattctatagagtggggcccgtgctccagtctggccacaatacccaccagagaggtgacctaccggtacgcaacagaggcgatttcattcttatccatgtcgtcctccacaaacgggtttgggttggggaagttgtatctttccttcccctgcaaaaacaaaggtgtcacaagacagagctaactttgttgacaaggccaaggccaatcagtcagacccagcacctctgcttagttgcagccctggccaggttcctggggcccttgatggggctctgagctcgctgcctgttttgtgcctacttgacccctcccaactgttagcacctgatgaattagaacaatgacttagtaaccatgctcatctctacttcatttttttgccatggcatatattcaccatttgatgtaaatcaatttattatttattgttcactgtgtttcctcctccactatcattaaattctgtaagggcaggaactttgttcaaagtcagagagcctaacatccaagcccaggcatgtaactcccctgctaaaggtggggactgcgtctgacctgctcagtcccacaaccaagagcctagcacaaagcagatgctccacaaacagcagctgattaaataagaatgaatcaatgcccagagactcgtttcctcaccattctcaagcactgctgggagaaattgtggttgatgtaggttgcctccatggccaggttgcggggtgaattgaaggaattaccttcatcttgagggggctcattggcagtctcactcactgtcaggaggtctgcaaaagcgtggcatggtcactcaccatgcaacaaagagtcactgacaatgtgcgcagcgctgtggggagatgtggagaggcaaacaacacaagtccttccttcaaagaactgccctctcctaaagtgggtctccctggtgtggaacacataagcgggggagtggggcagctgctccaggataactcaagatactgtccaacattcaattcaatcacacagtaacgaagctgtcccttttcagtcgttttggattcctcaagagaatgattttgcaagctttttaataaagacctcaggcttcaggctcagaatataaacacttttttttttgagatggagtcttgctctgtcacccaggttggagtgcagtggtgtgtccacggctcactgcaacctctgcctcctgggttcaagcgattctcctgcctcagcctcctaagtagctgggattacatgtgtccaccaccacacctggctaatttttgtatttttagtagagactgggtttcaccatgttggccaggcttggtctcgatctcctgatgtcaagtgattctccgcctcggcctcccaaagtggcaggattacaggttgtgagccaccgtgtccagcctgttttgttaatttttgagtgacatggttttcctttatggtgtataaatacatatatgtatggtataaaaaatatatatgtatatacagtaagcaaacactgaacaaggtatgcaagatggcaaaagtcgaaaaaggggtatttaaatgaataacatttgggccaggtgtgttggctcacacctctaatcgcagcactttgggaggccaaggctgatggatcacttgaggccaggagttcgagaccagcctcgccaacatggtgaaaccgtctctactaaaaatatagaaagtagccaggcgtaatggcacatgcctgtaatcccagctattcgggaggctgaggcagaagaatcacttgaatgtgggaggcagacgctgcagtgagccaagactgcgccactgcactccagcctgggtgacagagtgagactctctgtctcaattaaaaaaaaaaaaaaacaacaaaaaagcaacatttggaagcttgctattagggtgctgtgaggactccaaaagctgaggcctcaagcaggtactgcagtgacagtctcttctcctaacctctaaagagtgtgggagattcagacactgctgctgtcaattcccttgggaagacagaccactttctatccattctctagtaccagagacttgttctgtaccaacaaaaatactcaatgcctttgagttgctccccaggcacgcttcttaccaaagtcagagttgtctctcttgtcaaagaagagtttggacccaactctctggacgacaatatcccaggaatacactgagcgggtacagctcatcagcgtggccaggatggcatcagtggcaaacacattcccctgagtttttgccagctgcaaagaggatcaaagagagaagatggaaagacactcccaggtctcactgcccactcacatggatgggaaagaactcctttgctgaccacataaatccttaataaggaggccccacctcattgaccaaaaacactgcagccagtgagccagcaagtttcgggtggcagtggcactgcagcaccctaagcacctgctagattccagccaagtgcttcagatgctttcacctttgccccagtggtagtgctatgtacatctaccccttgttgcagatgagagaactaaggctccagagactaagccaggaagcgcggcagaactgggcttcaagtccagctgtgcttaacatccacatttccggtctacctggcaaagtgcttttacctataatacatacgttattcccatgtcttctgttctttctgcagcttcagctgtagaagccgacagcattcctaacaagggggagaggggcagaaggaggcgcacaccttgcggatgacagggtcgtctgtggtggtgacagtgtggaagatgcgcttgatgctccgcagtggcttctcactcctcgtggtgatgcggtcaaaggctttgtcgtagtattctagggccccacaacactcactgtgggaagagcaggcaaagacatgcaaagtaagagagataacccccagttttttcttttaagccatacatccagaagtcttatccaaaagtctaaaagaggtggaaagcaatctctggccagagcaggagagacgaatcctcagtgcttgctcagttcctgtccacttaacacctggcatagaacacagcaagcacaactcatctagcccaacgcccccattttaaaggtagggtgaccgaggctaagacaggagatgactagttatagaagcacctgggtaggctgacttctcgtctggtgctctggtttcccactacctaaattccacctacttgtcctttgaggtaagaagctatttgaaatgtcaggagaagcaaagattcctcctgaagaattgctgtgtttcttttcctgacaagagttttataacttaatcttattgctcttttgctcaggatgccaggaaacagaaatatacagtttaataatcagcaaattccattctgctttctctttctgccaaaagagttgtataactcatttcttctttcctcaggataccaggaagttaaaaagaagtttgcagtcagtgaacttctgcttttccccttggtcttgatttttttttttttgagatggagtttcgctcttgttgcccaggctggagtgcaatggcaagatctcagctcactgcaacctccacctccagggtttaagtgattctcgtgcctcagcctcctgagtagctgggattacaggtgtgtgccaccacacccggctaagtttttgtatttttagtagagactgggtttcaccatgttggccaggctggtcttgaactcctgacctcaggtgacccactgcacctggccggtcttgatttttttcaaatacctctgttaaccttatgaaatgtgttttgagtaagtggcttcaaagcctttttggaaatactagggcttaagaaaatacccatcaccagctggtccacacacataagagcagtgtagaaagtagtaaaagatgctgcttacatgtcctgtggctctgatacttccaagtagcgcatcttcatcaactgaggaaaatccatttcctctttcacttcccaatcactacgaacttcaactgaagagtctcggggtttctgcagttgaaaaccattagaggaaaaaaaagttatagtccatacaaaacataaataaaagacaggctaaaaatatgaagagctggcctggtgcagtggctcatgcctgtagtcccagcactttgggaagctggggcaggatgattgcttgagcccaggagtttgaggctgcagtgagctatgattgcactactgcactccagcctgagtgacacgagatcctgtctcaaacaacaaccacataaaacggaggggctcagtggccctttgggaggccaaggcgggcagatcacctgaggtcaggagttcgagaccagcctgtccaacatggtgaaaccccatctctactaaaaatacaaaaattagccaggcatggtgatgcatgcctgtaatcccagctactcgggaggctgaggcaggagaacagcttgaatctgggaggcggaggttgcagtgagctgagatagcaccactgcactccagcctgggtgacagagcaagactgcgtctcaataaaagagagaaaagaaaaagagcttttattcaataaatggagtgctgactgttttataagacagaatccctgactcccaggaatttatggtgtggaagaggaccaaagggatcaaaagttcaaaagcaaatggggttccactcccaggtaatgatgtcacctgatgaacatgtagaaggtcctttatatttctctcgggttattaactattcttgatacagcatcatatccaacaaaatgtagcttcacttttgcttacatgtgttctgttctcagaatgcccacacaagcacacgcaggtgaacgttcacagcagcatcaataatagtcaaaaagtgaaaaacaactcaaatgttcatcagcatgtgaatggctcaaaacaacatgatgtataattcaaaggactcttatttggcaataaacaagaaaagaagctcatctgggctgggtgtggtgcctcacgcctgtaatcccagcactttgggaggctgaggtgggtggatcatctgaggtcaggagtttgaaaccagccgggccaacatggtaaaaccctgtctctacaaaacatatgaaaaaaaaaaaaaaaaagccagacatgttggcacgtgcctgtaatcctagctacctgggaggctgaggtgtgagaatcactttaacccgggaggcggaggttgcagtgagccaagatcgcgccactggcactgcagcttgggtgacagagtgagattccatcttaaaaaaacaaaaaacaaaaaccaaaaaaaccaacaacagatgaagcacagctgaacttgaacaacatgggtttgaagtacatgggtctacttaatatgcagattttcttcaaacaaacatggattgaaaatacaagccaggcgcagtggctcatggctgtaaccccagcactttgggaggctgaggtgggtggactgcttgagctcaggagtttgagaccagcctggggaacatggcagaaccccctatctacagaaaatacaaaaattagccaggcgtggtggtgcatgcctatagtctcagctactcagaaggctgaggtaggaggatcacttgaacccagcaggcagaggttgcagttggctaagattcatgccactgcactccagcctgggtgacagagcaagactctgtctcaaaaaagaaaagaaaaagaaaacagtattcttgggatgcaaaccccgagtatatggagggccgacttttcatatatgtggctaccacaggccgaatgtgggacttgagaatgtgtagactttcatatactgaaggaaaactgtaccgacacatgctaccacatggatgactcttgaaaacacgctaaataaaagctgccagttactaaagaccacatattgtatgattccatttatgtaaaatgtctagaacaaaaaatcccgagacagaaaacagattcatagctgcctactgctgggctactgggggtgctggtgtttgggtgtgcctcctggaattcatttggcaatctggttgctactgcggcagtgtcgggaggtagggcctttaagagattaggtcgttaaaaggaataaatgcctcatgcccttctctcaggaatgggctaactacccaaagtttagcccttttctctgttgcaccctgctcccgcttctgctttttctgccatgctatcaagcagcatgaggccctcaccagatgtggctcctgatctgggacttcccagtccccagaaccatgagctaaagaaaccgctttataacttacccactctcaggtattctgttctagcaacggaaaacagatcaagacagggtgactgctaaagggtaagggattcttttgagggtgatgaaaatggtctgaaattgaccagttacagaactcttcaaatatattaaaaaccactaaattgtacggtatgtgaagtatatctcatctaagctattaataaagacaaccaaataaacagaaccaaattccaaggcagaattctggtataaatacattacctgtgatttctgatcccatttctgcctaaccccaaattgtttctggaactttttctgcagtcgaatgcgttctctggaaagacagacatatgatctcagtgcagacctttaaaccagtggcttcttcaaaaggcacacgctgccattctcttcagctaaaccttaccatcaccactaactcctttaaactacgaaaaatgggcttagagaaaggaagagacccagacggtgcatactggaggtgttagaaaaggtacactgcctccaaatactgaccagatgattttacttcatctatagtgactgttcactgatagttccaatctggggtgtagtggccgctggaccacacaacaccaggaggctcaaaggaccagcatacagggggcttcctagagttgacccacagcagaactgagcccaggtaagctccagagcctcttcttgcctgcctgtgtttccctttagtgcgcatgaccagcacaaggagttagtttcctgcccatgctatctgccatgaaccagcctgagaacgacaagctaaaagggggcttaactggttgtagaaagtattttccttttttgcagtggtggggaatacaaccatcctcctgctttggtcctgtggtttccaaatacggccagtctgggaagggtgtcttgttccagcaggatgaaaatctcacctctctttctgtttggcactcttaggcaggatctgcaggttgaactgcaacatgttccgacgatctttgtctctgcggaggttcctctgggcatcagcaagaaacatccatgttaaaatcttggagatttggctcacaataggcagaacaagtgggaggtctttggagtaaatttaggatgccaaatcccaagtttcacatcttactctgtgctttcactctacggcatcaacagcttgggggtgttagggggtaagtgcttggactttgcttagacctatactcccatgatatatttttcattgaagtatgtttactgggtctcattagattttctgagtttgcctctttaaataataataggcaatctgactggaccatctacttaataaagtctgcacacagcaattaagtgtggtaacaggcacaggtgcaccttcttatccagcacaaatgtttttagcatacaagtctgatgtcctagctactggcaaacagaaatataaactatttaaatgcatccctgatcctagtgcaagttcaccttggtaccacttgttatggaacggtgacccgagattcacgaaaagacctataatatgcttccctctctcattaggagtcacaaggtagcattttttagcaggtgatggccaacagtaacagccccaagatggtgtggttgctggctcttggcctacctgggcaaatctcattcgattccgctggtaggccgtcttctgtgtgcgcgctgtatccaccagctggaagctactttcatcctcctcatggaaataagcatattgacttccaccaccaaactgagaggagtacttatctggaggcaaaggtgatggcatgtagtaactgcacccacagactttaccagatatgcaccagtctaaagccttgctatttcaagtgtggtcttgagacctgtagcattggctgaaagcttgttagacacacagactcacagtcccaccccatacccactgaatcagaaccagcattttaacaagatccccggatgattcatatgcacattcaattttgaacaactctggcctaaagaactttctaagccaagaatctgaaggactcaaactaacccatttcactctctgcgttattgtgtgagaatctgaggtatttattgctaaccaccatctccattatcaggggcccatggcaggtatgtctaatagatcacgatatactttcttgccaatctcagcctcagctatcctaacttagttctccaggcagccacctccaactatctgaagtggcagagagaaaaagcctttttatggtaccaggatcttaaaaccaggggttttacttttttttttttttttttttttggagacaggatctggctctgtcaccaggctggagtacaatagcatgatctctgctcactgcaacctctaacttctgggttcaagtgattgtcctgcctcagccacccgagtagctgggattacaggtgcacgccaccacgcccagctaatgttttcaacaggtttttaaaagggcccaaaaccccattttaataggctagacctctttaatgaatggtctaagttttgagggctatttccaaaaatgtggttattgttaaagcccagaatacatccctaaaagttatgaattattgttggcagtttcttcccattctaaaaagctttcagaagaaggtcattagaataaagaacaactttcccaaggccctgattggggcattcagttgcagaaacacttacttgtgtacctcttatcttggtatgtggctcctgtccagtctgcaacctacgaagaacaagaaaagacagagaatgcacaggtcaaccaggcaagtttctgcagaaccagaaatccctgagcgcgagaggacagcgtggaagagtctcagaatttgttcacaacacctctgtaagtgcccagctcttctatgactacacccagagataacctttctcagctggcatccctataagaaattcaggagttaagattttgagacaataaaatctaaacagggactcgagagtagcagccacagctgcaaagattcagactcctgctgacaggcatgtacctttcctagccgatctcctttgctgaacggctggtagggcatatcccgaaactgctcgggaaccgcacagggaccccagcctgaggggttgtcctggatcacgggtgtcatgaactttgccatcttccaaaatctgaaaaatataaatcatgtgagtagcggcatgaacgaaggcctcagagtacaaaacaccctccatatgaagtaagcaaagacataaatgatagaactcaaaaagcaacacgcaaaatggaaccctcaactgttgagcgactactactgtttttgttaattatactgtgaatatgtacttaaaactgagaagaatgcaaacaaaactgatttttcatatttcattaattccacgacactctctttttactgtaacatctttaaaatgaggctgcaccttgtgtttgacagggtgttgtattgattggtagtttttctttttctgtgttacataagtgtttaaaaaaatttaatggtgtcagatttgataaaatgtcctaatgttttttcaaatatagtaaccttgttttggttctgagatataccttcaccaattcatacaaactcaacttccctaagacttagtagtcttttctttctttcttttttttttttgagacagagtctcactttgtcacccatgctggggtgcagtggcgtgcaacttccgccttccgagttcaagcgattctcctgcctcagcctcctgagtagctgggattacaggcaagcgccgcctggctattttctgtgtttttagtggagacagggtttcaccatgttgtccaggctagtcttgaactcctgacctcaaatgatcctcccgcctcgacctcccaaagtgctgggattacaggcgtgagccaccacgtccagccaccttagtcttttccatctgcaaaataaacaagatccttgttctaagcactttgtataatgccacacaagtattcagacttgcaaaagtgcatttatgtatatagagtgctgagaaaaaaagatctttaagtatatcctgaaattcaattttcctttctcattgtttcaattttctgccatcaacgcaaatcctgtgtgcagtgcaagcggacataaagccaggcagaagaactgccagagggccaaggaggtccccacagacctcaggcccaaagttgccatgttaaatgttcatgaatactgccaggcactgttcttactgtttaccactcattcattcatacagtcctgccaacaatcctgtgaggtaggagccaatgttatccgcactctccagataagaaaaccaaagcacagagaaatgaagaaattgcccaaagttgaaatgctagtggatgaaaaacgtgaaccaaagcagtctgaccccagagtctgcactctgcataatgctatagccctcttgggaattaaaaaaccggcgctgtatagcagatggctgcccgacacttctataaaaaaacctatgcatttatcttccgttgtaaccttctgaaaatgcttagaaggcgagttcctagaggaaaattcactacacaagtatttcttggaggccgggcgcggtggctcacgcctgtaatcccagcactttgagaggccgaggtgggcggatcacgaggtcagcagttcgagaccagcctggtcaacatggtgaaacccagtctctactaaaaatacaaaaattagctgggcgtggtggcgggcacctgtaataccagctactcaggaggcggaggttgcagtgagccaagatcctgccattacactccagcctgggcaacagagcaagactccgtctcaaaaaaacaaaaatcaaatgtttcttggaggctggagagcaatcaaaagaacaggtatgctgaacttagtaaactctcctcaaagccccatgctggggagattgaggcttccttcagagatgacatttgggtgacagcaacacaggatgaacctagaagtttcatctttctaatagaaactataggaagaggacagaagaaaaagggtggtggtctcagaacaatttgtattaaataaatattgctgagctcctacgtgttaggccctataccagataatttaacaccattgaccacccccccacccctactttagaggcaaaaatttgaagctcagcctactcaagcagctgacctcatcatttcaaaacagatttgatttccagggttgcctgctgtcagtccagccttctttccattatattacagctgggcagcagcccgcaaagatcaggggtttgagaccgtacatcataataccaagacaacgagtctcaaaacacactttaaaaaatcgggttctgtcagaagctcaagaagggaagaggcccgaggctcgacctgcatcacctccctggaaagccagggatgagataccctggctttaataaatgtttttttttttaagagcagagcggaaccaggaggagaaactgagccgctcagcaaaaacgaagtaacagctgtactagtcacaggggcaggatagggaggttccaagagggcactcagaaggggctctgtggttggcaggccactacagatcataagccgtccatcgctgaacagggggtggggtagatttaagatcagagatcaaatctacttctctatcctagcctccagtttcacaaaaaaggaaagataacctatgcactgtgaattcctaagaacaggggccaaacaccgctcagcctggtacccctaagacctcactcaaaaagtcagggagttttcggccacttcagaaagactttgttgttacccctccgtcttaacccaggtgagttaagtgacaatcaaattcacccagctcatgggcactgagcagggccgagggccaaggacctcacccacaaggtcgtgtcccgcgttcagtagcgtgcgggacgcggggcccccgaaagtggattcctgccccgcccagcggagggacggcaacagcaggaagggactaagagaggtctcttccgggaggccccccgaaggctggacctagtccgaaccggctccggagggccgcaggaacctatgaaacacgccgctcacctgcaatggcctcggccggccgggatggcaacagatggtgcgtgccggggaccgcgttagcagcagcactcttgagaaaccaggaaaagaggaaacatgcgcgcgcagcgggcgccgccgtaaacacgaccggcgctgtcgtaaactgctctcccgcttcctctgggttgggcggaagaactcacgagccgtaaagcgaaggtccacccggaaatccgttactgcgtttcgccaggcgtcctcattagcctccgaggcgccgagacgcgagaggtgtgattggcactacgtcaggcggtatccggggacgcccaaagagggcgttcatcactgaaacttggcggccgcgcaatcgaagctcgaggcggggagcgactggcgcccttctgtgtcccacaatgcttcgcggcgcgcctcagcccccatgtatcccaccgtcacccgcgactccccgcctgttctacctgcctgcttaatgtgaaactcagcgcaggggaggtccgtcggtgtcttaggcggtccttattgttactcctccgcctttatagttgtggaaactgaggctcagaagtgccaagtgacctgcctagatcagactgttagtttagggttctaaccgccagagttcaaaccatacttccgcagttctcaaacttaattgtaggacagggatttctggaacagtgtttttatttatttttatttattttttgagacagggtttcgctctgtcgcccaggctgaaatgtagtggcaggatcacggcttattgcaccctcgacttctcaggtacaagcgatcctcccagttcagcctcccgagtcgttggtgtacacaggcacgcacaaccacgcctgcctaatttttgtatttttggtagagatggggttttgctatgttgctcaggctggtctcaaactcctgagctcaacagtccacccactggggctagggttacaggcatgagtcaccgtacccggccagctaatgatttttaaaaattttgtagagacagcgtctcactatgttgcccgggctggtctttaactcctggtctaaagtggtcctctcgcctcagcgtgcggagcagctgaggctacaggtgcatgccaccatgcctggctaatttttttttttagacggagtcttgctctgtcttccaggctggagtggagtgcagtggcgctatctcagttcactgcaacctccgcatcccaggttcaggtgattctcctgcttcagtctcccgagtagctgggattgcaggcgtgtaccaacatgcccggctaattttccttttagtagagacggggtttcaccttgctgaccaggctggtctcgaactcctgacctcaggtgatctacccacctcggcctcccaaagtgctaggattacaggcgtgagccactgcgtccggctgcctggctaattaaaaaaaaaaaaaaaaacttctgtggagacgaagtctcatcatgttgccaaggctagtctcaaactcctgggctcaagcagtcctcctgtctcggtctcccaaagtgctgggattacgggcgtgagccaccacacctgaccaggatagtatttttaaaaattcagattctgggtctcattttgatagattatacggatatgtttatgctggagcccaagagctccgcattagctgtgattctgaagtgacgactcaggaactgctttactacagtagataacagtgctgtcctctcagcaactcccaggctatggagttcctcctggtgtctttctttcggaattttaaaacaatgaaagataatctgagggcatgactttattcaaacctcagatcctttctacctgacataggtttccttagccgcctagtatgtctcctttattagaaaatatacctgaagtctaggctctgccacattcttttttttttcttttcttttctttttttttttttgagacggagtgtcgctctgttgccaggcgggagtgcagtggcgcgatctcagctcactgcaacgtccacctcctgggttcaagtgattctcctgtctcagcctcctgagtagctgggaatacaggcatgcgccaccatgcccagctaatttttatatttttagtagagacagggtttcaccatgttggctgggatggtctcaatcccttgaccttgtgatccccccgcctcggcctcccaaagtgttgggattacaggcataagccactgtgcccagccagctctgccacttgatagctatgtgtggccttcacattccttgccttgtttccttatttgtaaattgaagatgataattagagggcgctgtgggggtgaaaataaatgtgtgtgaaaggacttagtaattccacttatcatttgggtgaacttggacaggttattcaacctctttttttttttttttttttttttgagacagagtctcgctctgttgcccaggctggagtgcagtggcgagatctcggctcgctgcaacctctgcctcccaggttcaagcaattatctgccccagcctcccgagtagctgggattacaggtgcccaccaccatatccggctaattttttgtactgttagtagagacggggtttcaccatgttggtcaggctggtctcgaactcctgaccttgtgatccacccgcctcagcctctcaaagtgctgggattacaggcgtgagccaccgcacctggcctattcaacctctctaaacctgcttattcatctgaaaaatgagaatgctaatagcagcacctatttccataagctctctcccaactgctcattttttttttttcctaatttttgttaatggtgtctggtgaattgtgcccagtggaaagccttgtagtcatcactggtagttcgtttttccttccctcccacatttagttcttcactatgttctctttattctacttgcacaatgcatcttgaatgctatcactttttttttttttttttttttgagacagagtcttgccctgtcacccaggctggtgtgcagtggcgcaatctcagctcactgcaacctccgcctcccgggttcaagcaattctcctgcctcagcctcccaagtagctgggattacaggcgtgtgccaccacgcctgcctaattttttgtatctttagtagagatggggtttctccatgttggtcaggctggtctcgaactcttgaccttgtgatccacccgcctcggcctctcaaagtgctgggattacaggcgtgagccactgtgcccagccgaatgctatcactttttatccccatttcacatcacgcttggatacactcttgctgctctagggtttcttctctatatggtggtcaaaggaatctgtccacaaccttctactagcttcccattatatgcttagagggaaatatgaatatctttttgtggcctgtgtggtcactgtctacctttgttatttttaaaatatttacttctttgagacagggtcttgctctgttgtccaggctggagtgcagtggtgtgatcatggctcactgcagtcttgaccttttgggctcaagcaatcctcccacctcagcctccgagtaggtgggactagaggctcatgctgccactcctggctaatttttaattttttgtagaaatggggtctcactatgttgccccggctggtctggaactcctgggcttaagccatcctccagccttggcctcccaatatgctgggattacaggtgtaagccacctcacctggccactggtctacctctagccaccatattcttcttgtgccttaaatacactgaacttctttctttctttttcttttttttttttttgaaacggagtctagctctgttgtccagcctggagtgcagtggtgtgatcttggctcactgcaacctctgcctctggggttcaagtgattctcctgcctcagcctcccaagtagctggaactacaggtgtgtgcctccacaccaggctagtttttgtatttttagtagagacggggattcatcatgttggccaggctggtctcaaactcctgacctccagtgatccatccaccttggcctcccaaagtgctgggattacaggcgtgagccactgtgcccagcccaccagccttctttccatctcagcagggcctctggacttgacgttctttctgcatggcacactcttcccccaggtttcctggtagttgaattggtctcatcatctatgcctctgctcgagagttaactccttatgcaggtcttttctgaccatcatttctaaaacaggtgattgtattagtccattttcatgctgctgataaagacatactggagactgggaaatttacagaagaaagaggtttaatggacttacagttccacatggctggggaggcctcacaatcatggcagaaggcaaggaggagcaagtcacattttacatggatggtagcaggcaaagagagagcgcttgtgtaggggaactcccccttttaaaatcgtcagatcttgtgagacttattcactatcatgagaacagcatggaaaagacctgcccccatgattcgattacctccccctgggtccctctcacagcacatgggaattcaagatgagattttggtgaggacacagccaaagcgtatcactggcatagagtaggtgcttaagtaggtactcattgactgagttaatgaaaaaaagaatctggccagtggtggtgtctcatgcctgtaatcccagcactttgagaggccaaggcgggcagatcacctgaggtcaggagtttgagaccagcctggccaaaatggtgaaatcctctactaaaaaaacaaaaattagccaggtgtggtggaaggcaccctgtgatcccagctacctgggaggcggaggttgcagtgagctgagatagcaccactggactccagcctgggctgcaagagcgaaactccatctcaaaaaaaaaaaaaaaaaagaaagaatcaaaattggaggaccaggtgtggtgtctcatgcctgtagtcccagcactttgggaggccgaggcaggtggatcacctgaggtcgggagtttgagatcagcctggccaacatggtggaacctcatctctactaaaaatacagaaattagccaggcgtggtggtgggtgcctgtaatcccagctactggggaggctgaggcaggagaattgcttgaatctcgtaagtggaggttgcagtgagccaagatcacaccactgcactccagcctgggtgacagagtgagagtctgtctaaaaaaaaaaaaaaaaaaattggtatgagattaactggcattaatgaggaccactcctcggcagcagacctgttgtatttatgatcaataatgtgagattcttgctttcaaagggcttccattccaaccaaaggaatgatgacagaaatgtttttttttcttttttaaaattttttaattttaattatatatttcattttactcaatatatccaaaatattatcaccatacgatataaaagccttattaatgggaatgttttacattcttttttgtgctaagttaccaaaatctggtatatatttcacatgcatggcataactcaatttgcactagctatatttcaaatgttcaaaagccacatgtagctaatgactattatattggacagatctaaatatagagttttcctgaaacttaaagacgtttcatgagactagcacttagtaagtgtggacaagagaggaatgagatgaagctggagtgggacaggcagtgatagatcacacagggcctggtaggcttgggaaggagtttggattttatactaatggcattaggtcacctcctacaagaagtctttcctaatgtcccaaaaagagttaaccactccatctcttgtgccaccatggcttttgatgaaaaacccaatatggcaccccggattctttattatatcttttagtatatacatggctgatttctcctcaagggcagtgaatgtgtctttattcatctctttattcccaaggcctggcacacctcttagcatataataggtactatatatttattggaagagtgaatgagtgggggtgcgagaatggattccttcagatctattttccagctcattaattctccctctagctatgtctcatctgctatttaacacatcccttgagttttcattttaacaactatgttttcatttctaaaatatctgtatgggttctttttcaaattagcctggtcaatttagagtttcttctacttatctcgttttgtgattctacatttcatatctttaaatatttcatagttattttatattccataccgaatagttccaatgtatcaagtgccttgggatctaaatctgctggtgattgattttcctgactctcactcatggtggcttattttcttctgtatctgattttcttcagttgtgagttcacatttgttcgatcttaacctgtcctgctttagcagtggttttcaaagtgtggttcctggacgagcacaataaacagcacctgggaattttttagaaatgcaagttctagggctgggcacggtggcacatgcctgtaatcccagcactttgggaggctgaggtgggtggatcatgaggtcaggagttcgagaccagccggaccaacatagtgaaaccccatctctactaaaaacacaaaaattagccaggcgtagtggcatgtgcctgtaatcccagctactcgagaggctgaggcaggagaatcacttgaacccggaaggtcgcggtgagcagagatcgctctactgcactccagcctgggcgacacagcgagactccgtctcaaaaaaaaaaaaaaaaaaatgcaagttctagagcccccatcccagacttgctaaatgagaaatgctgaaagtgaggcccagtaacctgtatttgacaagccctatagaaggttctgacacacactggcgtatgaaaaccactgcttgcaagataatttggtttacctctttaggaagccaaggagtgctaccgaccagcagccactttagtttttatttttaattttttagttttttattgactatgccttataaaaggaccagcagccactttaactttttggggctgggcttaaactagagttgcaggctcagctttactatgctgctgctggcctaaggctgtttactgcctgtagtgctggtatcatttgcagtcagggcaatcttacctttagcgctgtgttcttctccactgctttcccctcctgttccacctcaatataattttgtgggaggaggaggggagggttgaaggaactgtcttcaaagatttctgtaatttacagtgaacccaaaaattacattaaaagtctgtattatccaggatcgagctgttttaccatgggaaagcccatcagagtacccaaccctccatatggccagaaagaacaactctgtctgaatacacgagtttcaggggctgcttgtgccttcactcattagggttaaaacatggtcttaaagctgaaggccgcctctgacctgacagctccaagtcctgcggactcctgcgcccagtaatcacctccatggcgaagcactgttcctgctcccgcaggcggctataggtccacagcaggctctgaaagtgctcccacagctggacacgctgccccaggtctgggggccgcagcctgagggcagagccagagagggcgggagagaccacgagaaagctggtctctcccacacccaacaaaaggaccagagtcccagctcagtgttagagccaggtgagcccatgtgacctgcccacacagctgggaaagcgggtcgggtttctggcccagctctagctgtggagtggggtgggataggcacggagccagaaggcaggcagctgagcaaatcacctcactcttcaatctctgtcacacaaacacatgtcatataaacccagctagagagagccagggtggtgcttaagcttctcacacagaggccactgaacacagaaaggtctggtctatcatcagggccctacacagggttgcagccatctcggatgctggcaaggtctgcactggccaatgtggttcatgtaacaggcatctaccacctgcagcatttgccactgaaaccatgacctatctgggctaaaatggctcatgaaacaatgtttgtgcatttgagaaatgcctcgagcatgtacagcttccgctgcaggtccccctcgctcttggtgtggtcgccattgatggcaatgaacaggcattctccaaacaggtgaaggacatacagggagttgctgttttccatggagaagcaggtgtaggtgtccgagagcttctccagcatcgtcatggaggagatgatgaccggggctaggagggggctgagctggtcctgtagggcagggagctcttcttcctcattctctgactgcccgaacttcagctggagactctcttcaaactcctcatccgtccagtagaagagggcctctgtgccctcaatggccaccaagatgcacttcatcttggtaaggagcacagtggagcgtccagacagccagaggttcagaaagggctgcagcagacagactctgtgactgcctcatcggagagcagcacaacatccctggtcctgcaaatgcggatcgcggcgtgcacagcaccccgcctgcgggacagaaatgttttctgaactgaaaaagggggactacaggtgcctgccaggccctccatatacatacatccccctatgtctgtgtctagaagtgagatacaccgttatttctgttttctgattggcctttttagttttttgagacagagtctccctctcttacccaggctggagtgcagtggctcgatcttggctcactgcaacctctgcctccggggttcaggcaattctcctgcctcaggctccggagtagctggaattacaggcctgcaccaccacgcctggctaatttttgtatttttggtagagacggggtttggccatgttggctaggctgttctcgaactcctaaactcatgttatccaccccccctcggcctcccaaagtgctgggattacaggtgtgagccaccgcaactggcccattggcctttcttgttgtactgttctgtcccttccaggtaagacaggtacattttctagtagtaagctcctgtgtcttaaaaaagaaaataacattcattgagtgcttactttatgccaggcactgtgctatgggctttatataaataatttcctctctgaaaaaaacaaagacaacaaaaaaaattacttctttgattcttttctaaaagttccttgaaattgccatggaccctcccattcgtgcaggtggggagaaagaagctcagagtcgttgagtacttggcccagtgagtaaatggtggagccaggatttgtgaacagttttgtggactcagaagcttccatcccttacaggggtggtgaagaaggcctttccgagaggcccgagaggccccaaggcagaaccatccagccaagcccaccccaaattcctgtcccacagaaaccaagagagataataaaaagacggttgcagggttgtctcgcccctcctctgtctcttgcctgctctctctaaggaattcagagccttcccatcttgaataccagcggcagctccagaatttccccgtgggacaggcttactgagagccgtcttgtgaagggggtagccctggacttgcctgggagctgtgtctgtgtagcaggtactctgctttcaggaggatgcaggttttgttgggggagagtgttccagggactgtgaggggactgagcctgctcctgaagccatctcctttttatttaattttatttttttgagacagagtctcgctgtgttgcctaggctggagtgcagtggcaagatcttggctcactgcaacctccatctcccggttcaaatgattctcctgcctcagcctcccgagtagctgggattacaggtgcccgccaccatgcctggcaaattgttgtatttttagtagagatgaggtttcaccatgttggtcaggctggtcttgaactcctgacctcaggtgatccacctgacttggccttcgaaagtgctgggattacaggcatgagccactgcgcccgaagccatctcttggtaaaatactgctgagcattcagacagaacagaattaggagaaagagaaggaaccagcattgatttcttcaacacactgtgctaggtacctcaggcatttcgattattctaggctgtgagtgaagagttgttgccagaatctaaagtgtgttctgagaacttggccaaatgtagggtgaccatatgacttaccattcaaatttgggacactttgggggtgacgaagggattactatcaataattatgccctgggattgtctcacttaaactgggaggtatggtcaccctaggcagaagggaagtaaaatggtcctctgttactgattatctgttgctgtgtaaccaatcacaccaaaatttagtggtttaaaacaacaacagtctttttattatatctcttagtttctgtgggtcaggaattgggagagggcttggctgggtggttctgacctggggtctctcatgcattatagtttggtgtgggtggagcttctgtttttctctctctccatttagcctcagggtcattctgtagtgagtccatgtggggagttcagagcaagtattctggcgaacaagctggaagccatgctgccttctgtgatctagcctccgaagttatacagcatctctcccatccccgtaacttgttggttccaagtgagtcacaagcctgcctagagtcaagggcgagggaggacagagactgaatttcttgctgggtaaggcacaaagttatggaacaagtatgtggagtgggaggtattgtcgtggccatcttaggggtatgaactctgccatggatgcagactggccttttctaagagtcatcagtttggttatctgcaaacatgactgaagagtgtggggtacatcaatgccaggcaaagtttctgaaggagtctggctcagagggggaggcctggaatacgatcctagtttaccaaggggaacctggtcagttaccttgcaactttggagaaagagtgaatggaagtgtccctcagtaggggacatttaggaaggggatggtcacagagccagggctggcattgtccagggcacaggttcttggttgcgctggctcaagcatcatccccattccccgggtaagactgtcctcccaaaacagaggtggcttcaagctgctctgtgataaacacttttttttttttttttttttgagatggagtctggctgtgtcacccaggctggagtgcagtggtgcaatcttggctcactgcaacctctgcctcccaggttcaagtgattcttatgcctcagcctccctagtagctgggattacaggtgcctgccaccatgcctggctaatttttgtatttttagtagagatggggtttcaccacgttggtcaggctggtctcgaattcctgacctcatgatccgcccgcctcggcctcccaaagtgctgggattacaggcgtgagccaccgtgcctggccgataaatgcttcttaatgctgttgtttattctgactccctgccaccaagcagtgctgtgacaccgtggatcctcatggaacttgtgctgtagggaagcacgtgctggttaggctgatggaagtgctccattctgctggtggggtatttactgtgctctccaataataaatggatcttctgctatgcgtcagccttgtaagtttggtcaaagggagtctgccaccgccttgtgtgcagaaagatcccggatatcctgtggtggattcacctcattgggaccggtcagtgtggccaacctctcttccagagtggcaacttgcgtttccttgcttatcttttaagaagcaccataggaatcatcaccccattttatagacgagaacactgaggctcagagaggaggaatgtcttgccccaggtgagccagctggtcagggtgcatttggaatggaaacccaggtgtggctgaaaccaaagctggcactctccatgcacaattccaaaacccacaaagctctgaaaatctaaagctttttcatgagattggggcaagcatttgatggcaaacctgatatgaattggatgtgaggttatttatagtctttattttgtcccacttagcgtgaatatttatacattttgctgcagaaaaattaaagggtttatggaatattgctccagagctcactggcatgtcacctgatatgcggtagatccactcgaaaacctttcaggaatccaaagaattccaagttataaagcacattgaggccggatgtggtggcttcagacctgtaatcccagcactttgggagcccaaggcgggcagctcaccagaagtcagtagtttgagaccagcctgggtgaaacctcatctctactaaaatacaaaaattagccaggcgtggtggtgggtccctgtaatcccagctactgggggaggctgaggcatgagaatcgcttgaacccaggaggtggaggttacagtgagccaaaatcgggccactgcactccagcctggccgacagagtgaaactgtgtctcaaaataaataaaatataaaataaaatacataaattgataaagcacattgagccgcgaggatttcagataagaaattgtggagctgtgctacctgtaccaaacttttctgtctcggttaggcagagatcactacccccattctgcagatgaggaagactgagggcaaggaacatggtgtcccaggtaggacggcagccattttatcatcctgttggaggctgtgccagcaggaaaggaagctttggagccaccagcccaccccagcctcccaagaaccttgttgtctcagcaaaatttcagaactagaaaacctggaaagattaaagccccaaagaatgccacaagtcccccaggaagaaagggaggctttgctgtgcgttccagtggtcgacattctaaatcattttttatttcagctgcatgtacactcacccatcacaggaccagttctcagaatagagaggtacctgttgaatcatccaccctacttcctgcctcgtgtgggcatgtctccaagtgctgagccatccgcttcgctgccgtggcctgagatatatcaggatttgcaggcctggcgacaggagacaaaatagattcccatttccttcagaaccatttagctagtttagagagtgtttgactgtttcaatgggatgagcaataaccaggcctctccttggctccttctctctgccccatatgttttcttctgttggaagctgggatttggggtcttagggccaaagataaatactgattttggctcgatctggccgcacagctgtgggctagtaggtgcccctctctgaacctcaggcccccactttctgcagcacagtgttgttctcatctctgttttttttttttttttttttttttgagatggagtctctctctgttgcctaggctggagtgcagtggtgcgatttcagctcaccgcaacctccatctcctgggttcaagcaattctccccacctcagcctcccgagtagctgggattgcaggtgcctgccaccaggcccagcggatttttgtgttttttagtagagacagagtttcaccatgttggccaggctggtctcgaactcctgacctcaggtgatccgccctcctcagcctcccaaaatgctgagatgacaggcatgagccaccgcatccggtctctcatctcttcataccacatgccttggttcccactgccccggcgggtgcctggagagccttgtggctggggctgagtgaccgcaaggtgatatttaaggtggtctcatggagcagtctgacatcactgtaatgcaagcagacatctggggagtcagactgactgaatttgaattccagcgatttaaatttttaccactgttgtgtgaccttgggcaagttgtgtgaccatttgagccatagcttcttcatctgtaaaatagatggaatcatagcatgtaccacttcgggagggagggagaatagaattaggtcagattttatatgtgacatgcttaaggcagtgcctggcatgcaaataagcccttgatacatgccagtggggttactctggttaccagaaacttggaagtaggggctttggctggggcaagatctcgcaacatttaaaaagcaatcactgaccgggcaccgtggctcatgtctgtaatcccagcactttgggaggccgaggcaggtggatcacgaggtcagaagatcgagaccatcctggctaacacggtgaaacctcgtctctactaaaaatacaaaaaattagccgggtgtggtggtgggcgcctgtagtcccagctactcgggaggctgaggcaggagaatggcatgaacccgggaggcgaagcttgcaatgagccaagatcatgccactgcactccagcctgggtgacagagagagactccgtctcaaaaaaaaaaaaaataaataaataaaaagcaatcactggtcactcgtgaggaaccaggccccgagttggtcactcagcgttcaggtggagaccttgccatgctatcaagtaacctagagtctatttttttttttaagatggagtttcactctgtcgcccaggctggagtgcaatggcacgatcttggctcactgcaacctctgcctcccatgttcaaacgattctcctgcctcagcctcccgaatagctgggattacaggcacccgccaccacacccgggtaatttctgagtagagactgggtttcaccatgttggccaggctggtcttgaactcctgagctcaagtgatccacccgccttggcctcccaaagtgctgggattacaggtgtgagccactgtgcccagtcaagtaactcagagtctaatggggaaagtagatgtggctaatccaggggctgcaatacctataaagtccttaatcaaatatattttgcgtctatgtttaaaaagcagatttcacctaaaaatctagttttttggcttctcttaagatctggcaacaccgggctggccttcctgcgatacgagaagaagctggagctgaataggagttgcccccttggccaggggctctctactttgcctcagtccccactactccctattgcaccagattcaaacttcttcatagtcatgcatgtttgccgctggggcctgtgggagtttgctgataagttgcagtgcaatgctgtgggtgctgtgagagcacgatgagcaataataactcagccttgggcagtcaggaaaagcttcccaagggaggcgaagtcacagctgcttctctataaaacctgcagatgctgctgaacaccctcatctttatggctcaaggacatgaataaaggacgcaaagtcagagctcacgaggaatctctggcataaagcgactgaggcccagtgacttatctcgggtcacacagcctgctgatggcagaagtggggctagaactaggattaccaaccagaaacctttttggactactttccctagaaccagagctgtcaaccagaaacagttctgggccactctacctcccctgtctctggattcctcgggagttaggaggatttgtactctggaatcttagacttgagtcctgtctctgccatttacttgcagtatgacctcagatgagtcacttcctttccttgaacctcagtttcctcatctgtaaggtagagctaaggattctgacctcaaaggagtgttctgagggccaaacgttgggaaagtggacaggaggcaatctcagacatctcattagctcaagaggactctagatacctgagggtcattatgactgttgacaagtagccaccttctcccaagagattttgttaccatctgtttaacagtgaccttgaaggggatccatcccccactttgcccttgccagtcccttaaaggagcacgcatggcctttggtcaggcttggaccctggaagggaatgctttgggattctctgactttgggtgtgaactgggccctggatgcagagcccaagggttcccctctcctgggaggctccaaggtcacagcgagtactagggtagagttgggaaggaagcagaatttcctgggcaaaagaaatgtcaataattcttttgttttcttcaaggcatctacctgcctatctggggctccccttaaatcccatgtctgtggctggaactattgagactctcctactttgaggaggtcccactgtcctgagttcaaatcctgacttttctccttattagttgagtgtgactttggttggacaagatttcaaattcctctaaactccaatgtcctcatctacaaaatgggcctcttaagagtacacatttggtaaggtttagtgggaattaagtgagattatgtgtgaaagggtttagcacagtgtagagctcagtcaatgcccgttattactgtgattggaaattagaatgattgccacccatcgtgtttgtataacacttgaccatttctgaacttatgcttctcttacgccatttgatcttcgcaatgactctttgaggtggccggtgcagggatcatgacctcattgcacagatgagacaactggagctcagagaaggcaaccgtctactcaaggtcacacagcttgagtatggcagagtggcagagccaagttcacttcttgttctttttttttaagatggagtccggctctgttgcccaggctagagtgtagtggcatggtcttggctcactgcaacctccgcctcccgggttcaagcgatttcctgctaatttttgtatttttagtagagaaggggtttcaccatgttggctaggctggtcttgaacccctcacctcaagtgatccacccgcctcggcctctcaaagtgctaggattacaggcgtgagccaccacacctgatctcaagtcttctgagatgaagattaaacagcaccttccacagggtcagaccggacgagacaagaccaggctttgaccacgtggttgggttgttccctgggtgcttcatatctcccaaaaactccttgatagaaataatccacaatgctgtttcaaaccctttttgcctctgtttatgctctgagcctgtaccacctctaggggcgaagaaacttctcctttctccgtggcgtcaaacggacttttccttgtatttgtcctaaagggacctcagcagcccctccccgttgggtccgtcaaagcactctgccagaaggtctgtgtgttcttcagtgtgggcacatgatggcgctgctccacaacgcatgaaaaatcaggcccaacccacccctcaccccccgccccccggactgcatttcaacgcatcaaagatcaattaaacacctactatgtgcaagtgactgtgattgctccggggagggcttcagttattcaatactgttatgtttagctatattaataatagccgtaataacatcggtacagggcttcatagtttatcgagcaatttacgtggattatctggttctatctgccaagcagtcctgatgcgttagatcgggtgggtctttctgtcccacttgaggaggaaactgaggcacggagggtgacagaacttatgtaaaggcacgggggagagaggcacatggtaggcatttgatgaattataggtggtggatggaatgaggcagacccaggcatctatctcctccaggttgttattcatcagtgagggccgggattgtatcttatttgtctttccatccccactcctagcacggcttctgattgagggcttccacagacctctgtggcagggagaggagaggcagggggattccctgtaggctgcaatgccgaacagctcctggaaggctctctgagggtgtgcaggctgagagaggtggcttctgggctggagactgcaaagagaggaggtcactgccttcaccgtgtagcatttgcaggacatgaatgactcaccgtaattcagctcctgaaggcaccaagtagctgagtggtcaggatgattcattcattcattcaacaaacgttttctgagtgcctgttacatgctaagcattaagaatgcaggtatgcaaacacagcctctgtccccctggagcttccagagcagtggaggagatggagggcaaagagctagcaatgcggtttggtttgagttgcccagaagtctgtactgagtgccacggggtaaccaagtctagtggcacagtgtgaaggctacaagagggggagatgttttgcaggatttgaaggatgaaatgaatttgcagataaccagacaaagaaaggtgcatgaggactgggggaaggaaagcatcaggggcagtggggtatgtacgggcaggagctgtcaaagggcgtcagtcatgtgtttgaggatgggtaacagatgcagtaggaaagacagtggtaccagcagggagggccttgaaagctattctgaggactgtgaattgcatcttgtatttgtcagggaatcaccatgctgggagctctgctaggagctcagagttccatggagaaggtgggcaaagagaggcccatcactcatgtttactgagccttgactatttcgtggtgctaagcacttcttgggccttggtttattgtctgtcttataaggcaggtactgtgatcatccccattttatacacgagtaaactgagacttgggatactgacataagtttttcccaaggtcataaaactggtactagtggagtcaggacttgtcttttttgttttttaatggtcacctttactaaagctgaagtgtatgggtttttcacggatggggtacaaaattcaaaaggctcaaaaagtcccaagtgaggttgctcttctttttttttttttttgggatggattctcgctctgttgcccaggctggagtgtagtgggatgatcttggctcactgcaacctctgcctcctgggttcaagcgattctcctgtctcagcctcctgagtagctgggactacaggcacatgccaccacgtctggctaatttttttgtattttttagcagagacagggtttcaccatgttggtcaggctggtcttgaactcctgacctcgtgatctgcccaccttggcctccctccctccccagaggtgactactcttacactttcttgtgttttttattttctagagactttgcctgtttgttttgtgagaggtgttttatatagacataagcacaaaaagcaagacaagacaagtgcctgttaactacaaacatgggctttgggaagagccagtgtgggtttagatcttgactttttctgagagcctgacaagtgtcaccattaaatgctggtttggacaaagggtgggcgggcttggagggtgggatgaggatggcagggggtagggacgtggacatcaagaggtctgtgtgcacaagtgtgactgtgtgggcctggactgggggtgaggtgatcagatggggacaggaaatggggactgcagaggcctggtgagagacagagcagggacgaggcaggggagagcggctgctgcggggctgtcatagccggcaggcgtttggcagggcagaaggcacagtaagaggaagagaggcagcctgcgggcttggcttgggacagcctctctaaggctcgtgctgactctcgagcagttccagctcagcaggccatgcacacgaaccaggaagctgggtggactgggctgggaaggaggccatgggctcaggagcccgggagatctggtcccagtgcccagtggggattctgggcaagccaattcctctccaggcatctgtgcgggtcagcgccacacggaagcccctcgtccctgttgatcttcactgtagagggagaggcagggaaaggcttgggagatgccgggctgggatgggctaggggcttggaatgcctgcccagaggttttcagggcggcatctcagcaagtgtccacagtgtgcagagctctcccaggcaggatgggcacctatacatgcatgcatatgtgtactttacatgttatatgtaatacaatgtaatacatgttattttgctcggttcccacttccccttttagaagccagttgatatataatgagttggtgtcctcccattctttttgatgcattgaggatcctaagtctgtgccccagtccccatagtctgttcacttcctggcttcctggaagaacaaaatgtccccgcctcctctcgttctttccctgccccactcctagaatcagctgtttttctaaggagcccaggttttcttccctgagaaatgctatttgggtgggggagagggagggaagcaacaagctgtgggggaagagcctcgatctgggcaacccctttgctcttgtgacctcgagcaagtccctcggggcattaggggaccagttatgtcctttctagactcacctgaggccaagaagatgtgggaaacatccatcctgtgtgcctgcggtctggaaaggcacagccccagctctgcccctgtgtggctgtgtgattctgggtttcttaacctctctgagcctcagagtccccatctgtgagataggaataacatgaggcttttttttttttttttttttttttttaagacagggtcttactctcttgcccaggctgaagtgcaatgacatgatcatagctcattgcaaccttgaactcctgggttcaagtgatcctcccgactcagcctctcaaagtgctaggattacaggcatgagccactgcatctggcacgtggacatttctgacttatctcaactagggaaggtactcaataaatgctaattcccttcttcctccccttaattatttgacttcagtaccccaggaaatgaggactgggatattggatggtttgggagaggaggaaagaggtgtccagggaaaaggaagaaattgggaaatagaagaccacggacaaataaaagaggaggggttaattcagaatagggaagacgggccaggcgcaggggctcacacctgtaatcccagcactttgggaagccgagacaggcggatcacgaggtcaggagttcgagaccagccttgccaatatggtgaaaccccgtctctactaaaaatacaaaaattacctgggcgtggtggcactcaactgtagtcccagctgctcaggaggctgaggcagaagaatcgcttgaacctgggaggcggaggttgcagtgagctgagatcgtgtcactgcactccagcctgggcaacagagcaagactccatctcaaaaataaaaaaaaagaaaagaaaagaatagagaagatgattttaatcatcagagctttccaataaaggcaggctctggctgcttgggggaggttgagagcctcctgtcattagaggtatgcaagtagaggctgagggattgtgagccacacagatgtgtttgtgaggactcgcaatggccaggaggtagattccttcactcagcaaactttgggagagggctgtccttgcctggtcctgtaatggggcagggaagccaaggtgaataggacaccatccctggccccagggagcgcccagcccaggaaataagcaaatcgctgagatccttttactctgcagttctgtgctttgaagcatccaagccttggagggagttggctggggattttcagtgtgcgccttttggtattgatccactgaagttggagctggctggggaatggcaggaggacgccgcagtgttattagtgcggaggacacgctgtaatctgtcagtgtcaccccggttgcagctggccaggaaccatcctgctgttaacgcctcccttcccagcagccatggagcacacaacttgtacagcacctgccagtgcctccacctctccttgtaggagggagagtgtggatatttattctttttctgcatctccctagcatgagtcctcgtctccaatcacactaatttattcagtgttttccaacacaccttgggcattcctacctctgtaccttcagttaccagaattccctaccagcggtggtcactcctgtccattcatccatccacctgtccatccatccaatcatccatccatccacccacctatccattcaatcatccatccattcatccgtcatccatccatccccccattcatccattcaatcatccatccatccattcatccatccacccacccaccttccatccattcaactttgcaatccgcttcagttcaattcaattcaattcacctttattcaactcataaggttactgggctttgccatgtaccacacacatgtgataagtgaggcatgcctctgccctcaaggagcccatgggaagaatcctccccattctccatggccagctttgcatctcacctctgttaatcctttgccatgcccttcagcagaagcaacggactctgaagggctgtcctgtgaggagagttcagttctggctttcatgaattgcagaggacagagctcagacaaggagagaggcaaagggtggggaggaggtgagagtgagatgagctagtgggacggggattttggctttgtggagggagctgcttccagttagctgtgagtactcagcagtgtattgggggatgaagggaaagagaagggggcaaggaaaccactattggagaagtgggttagtgtggcggtgaggaggtgagctctgcagccaatggactacctggcttattgtctcagctccaccatattcctgctgtgtgaacctgggcacatatcttaacatctctgagcctccatgtcctcatttgtaaaatgaggataataagacctatctcacaatgttgcctttagcattaacacatgcagtgcttaaattaatgcgtggcacaaagggagagcttaatagattccagctttggttgtgactactcctattacgtaccagctactatgccaggagctttcattccagtgtgtcctctgagctaaccctatgcggggattattgaacccattttgcagatgaggaaatgaagaccgacggaagctatctcttgagctcgtcatgcagctggcgaagggtggagcagggcttcaaatgcagacctttccaactccattgtccctgctctcctgcgtgccctttcctgccttttctcaaggggtgagtgctctgagatgcaaagattggaagacttccatcccagcttctgcctagggcactcttttggccttctctagttgtagccctgaattgttaattactgtttcatgtatgttttctctgctccccagagaccatgagatcaagaaaaaagattttcttctccacggcaactgaagtgttgactttgacagtgaaagctacagagtgtatgatgtttccctttttgccttgcttgccaggaagcttgtgctttttgtcaaactgcttacttcccctttccatggttttggtcttctacctttgacagacttttattcataagtcttactgtaagctgttctactcatagaataagctgaataaatagaaattgaattgaatggaaaaggatgggttacaaattacaagtaaataattcattttatatttaatttaatttatttatttacttttgagatggaatactgctgtcacccaggctggagtgcaatgtcgtgatctcactgcaacctgcgcctcctgagtttaagtgattctcccgcctcagcctcccaagtagctgggattacaggtgcccatgcctggctaatttttgtatttttagtagagatggggtttcaccatgttggccaggctggtctcgaactcctgacctcaggtgatccatccgccttggcctcccgagtgctgggattacagatgtgagccactgtgcccggcctgcaagtaaataattcaaataaaatcacgagcttcaggaaagaaaaatgcctttcttatatcgggccattgccacagtgtttagccctgagccctggttctggctgggtgaagtttgcatggaaagcccagtggtgattttccctgttgtgtctggatcagtggctctccttgcacctagaatataactcaaaggccttccctttggattagagcagcagtccccgacctttttggcaccagggatcagtttcatggaagacaatttttccacatactgggtgggaaactgtttctcctcacatcatcaggcattagttagagtctcataaggaacaggcaacctagatctctctcatgcacagttcacagtaggactcatcctcctgtgagtatctaatgctgccgctgatgtgacaggaggtggagctcaggtggtaattctccatcacccgctgctcacctcctgctgtgtggccctggtccaaggcccagggattggggaccccgggattagaggactgacccctgcccacctcttccaccttatcctgtgtaacttgtccccttgctcacccaggataactactggagtcatctttgagatgttctcacaagccaggttctttccctgcttcagaaaagaggctttgtggctgggcgtggtggctcacacctgtaatcccagcactttgggaggccgaggcaggcgaaccacctgaggtcaggagttcgagaccagcctgaccaacatagagaaacccggtctttactaaaaatacaaaattagctgggagtagtggcacaagcctgtaataccagctactcggggaggctgaggcaggagaatcacttgaacccgggaggcagaggtggtggtgagctgagatcatgccattgctctccagcctgggcaacaagagcaaaaactacgtctcaaaaaaaaaaaaaaaaaagaaaaagaggctttgcatgtgccgttccctctgcctggagccctctgctctctcccatcccctgcttctgcctggctcatcattcctacgcttcaaatttctgctgaaagtcagcatcttagggaggcctcccctgactgctctgtttaaaggggttgtggtagctggtctgcaaagacaactcccagtgcttcctggcctctcctgtgtatgctgctgttcccatcaagaaacagactctatttctcctcctcctggaagtgggccgggcgttgggcctggctttggccaatggaatgtggcagaggtaatttactgaggcttccgaggtgaggccttcagatgactggcagcttctccttcctgccacctggaacccagctggtatgctgtgggaagcccatatcacatagagagacacagcgggagaaatggggtgttcagctcaacagcccagttgaacccccagccaacagtcagcatggattccagccatgtgcgtgagccagcctgggtgctgcagcccaggtgagcccctgaatgactgcaggcccagctaacatcatacggaacagaagaaccacccaactgagcccacagaactgtgggagataataaaatggtattgctgttttaagccactgaatttccagtcatctaaagagaggttaatccctgataaatttctctctttctctctctctctctttttttttttttttagagagacaagttctcactacgttgcccagactggagtgcagtgactgttcacaagtgcaatcatagtgcactgcagcctcgaactcctagtctcaagcatccctcctgcctcagcctcctgggtagctgatattctaaaaatcattgccccaatgcacttacttcatagcattcacaataatctataattatataattatttgattcttaacttgctaattttcccttttttctttttctttttcttttcttttctttttttttttttttgagacagtctcgctctgttgcccaggctggagtgcagtggcatggtcttggctcactgcaatctccacctcttgcattcaagcaattttcctgcctcagcctcccgagtagctgggattacaggcatgcgccatcatgcccggctaattttttgtatttttagtagagatggggtttcaccacgttggccaggctggtttcaaactcctgacttcatgatacatctgcctcagcctcccaaagtactggaattacaggcgtgagccaccgcacctggccaattttccctttcttcctatagcacatgagttacagaaggctgggaccatgtttgtcttgattgcagctatccccagcattaagcacagtgaatggcatgtggtgggagctgaaagaatgaaagaatgaatgaatgaatgaatgaatgaatgcaaggcatcggagtggtcttgaagtgttcctaagagccagtgtaagtctctgtggctgcagcccaggctgatatagcaccagaaaggagatgggtatggcctaagtctcagttctctggggctttcacgactcagaactgtacaacactccctgacaccacctctataacccagatctccacacccctgccaggaagaatcacccttttccttctccttgcccttctgtatcctgcacagctctccattaggggacccgacaggtctccgcgcatgctcgtgtgtatagatgatggaagcaggacagaataatgggtatgaatgagggctctggatccagagacccccacctttgaaccccagtccaccacattctaaggatatcttggtgccatggctacagatattgagtgttcactcacataggaagtgctgtgtaagtgtgagcttacattacaattgccatgtgccaggcactactctcacgtcttgaattcatttacttcatacaaccttataaggtggttgctattatcattcccctcttacagatgaggcaactgacgtgtggataatttgcccaaagttgcggatctgaaccctgccaatgtggctacagagcccaccttcttcttttttttttttgagacggggtctctctctgttgcccaggttggagcgcagtgatgcaatcatggctcactgcagccttgaactcctgggctcaagtgactcttccatctcatcctcccaagtagctaggactgaaggcgtgcaccaccatgcccagctaatttttgtattttttgtagagacagggtttcaccatgttgcccagcctggtctcaaactcctgagctggcgtgatccacccagcttggcctcctaaagttctgggactacagccgtgagccaccgtgcctggtccagagcccaccttcttaaccctcatactgcctctctcgttctcaaggtagaaccctcgttctgcctccctgagcctcagttttcatacctataaatgggataataatgcctgtttaatagggctatgataccatgatctggcagtgcctgacacattgtagaatctcaataaatcccaatttgctgtggcaagatagatgaacagacttccaaaccaaggagggctttgaagctttactgtgagggtgctagagaaccactgaaagttttcgagtaagacaatgacatagtgaagctgtggcttagctccagtcctaccttttcccgcctctgtccccccaacaattagctctatgctgcctgaggttggtatctgagtttcacatccctgtcttacctccccgtgaggtgctgagatttgaactgtttcaggatcgtgatagttcatcccgggcctggaatgaatggggtgggagggatgttcttgatcttgtgggactcatctcaaagggctgcctcagagatcccatctggggccccatttctgtctccacctccagccctactgactgacagaggtgcctgggtttcatatgactgacttcgtattccccttggaatcccttctgcagcatagtggatgaggtgagacagaggctggtaactcggtggaagagagaggagggagaaaaaacaagggagccagaacaggagagagtgggagacagggggacagagagagagagtggtggagagagggcgagccagagtgagggaaagatgggctcactgcttcagggcggggtgcacctggtgacagaaatgggccacctgaccttgtgctgtgttcccttgttctgacagatatggtgaggccatctgaccttgtgctgtgttcccttgttctgatggatgttgtgagtctgtgtgggtgcacaagcatgcacatgtggtctgtgtgtccacatagatgcgagcgtctgtgacatagcatgcaccctgtctgctggcctgtgcatggaagtgcacagatgggtctccaaggacctagggactaagcatgtggagaaccatgtgcagtgcctatgtacgtcctcagccccagcgtcacctcctccatgtgcctcaccccctattcgttcaccctcctccccctgtggtggcattatcacctttcttggtcagtctctgcttacctgtccctgtctctgcctctattgagagcttcctgcaggaaagtccacatccttgtcatccctgtactcttggcagcaagatcaaggcttgctggggcaggtgatcaataaaggctgatgactgattgagtatatttgtgtgaatggatctacttccagaagcgtgtgtgggtgtgtatgtgtgtgtgtgcacgcacatgtgcacacatggaaacatgtatgtggccatacacaaatgcacatgcactgtggggtgtggatgtgtctctgagatgtccatgaatgagcctctgggcacacaccatgcccacagattgatgcagtgatatgctggcaaatgtttaacaaccggctcttcattgaaaaaaagaatgctgttgggccgggcgaagtggctcaccctgtaatcccagcactttgggagtctaaggtgggcggatcatgaggtcaagagatcgagaccatcctggccaacatggtgaaaccccatctctactaaaaatacaaaaattagctgggtgtggtggcgcacacctgtggtcccagctacttgggaggctgaggcgggagaatcacttgaacctgggaggcggaggtagcagtgagccaagatctcatcactgcactccagcttggtgacagagtgagactctgtctcaaaaaaaaaaaaaaaagaaaagaaaagaaaaggaaaaataagccctgattagcagcatttgcccattgctgtagtgtaaatgttcccaccatggccgacttcaagttgctgctgtggcgtcatggaatatggagttagctgggaagagatgcacataactggctcacatgagcccacaggagttggcttcagtacacggaagtattcatgtctgtgactgcccagcccatgatgggcaggggaggcagtgcaaagttcccctggtgatggtaatgcttctttccagagctgtgccctgggggagcaggcagttgctggctgccagccagctttcaccaagcggccttagaagtcagtctaaaccaatactccttgttaggcaggtctaggcgctcaccaacacagcagcaccttccctcactccctgcagaggctttgaagtttttggatttggtgaagtcagcatgactgcaaggaggaattgctaagcctgaagcatgaatggaagagggggaaggaggaacgcttcaaacctccatctgaggcaggtggccagggatgctggaaggtctggaggccctgggccttgtgcctgcttgaagccgattcactgtgtaagcctggacacatcgcttgcccttgctggcctccacctgtgacttccgtgaagggagaggtcttctgagctccgtggcctctacctgaccctctgggagttggtccttaaactgcgctctgagtgttaaaatctacattcaaaaggcagagagaggctgtgttggccttaaacaagagcaagaggggaccctgccctggccctcctcagaccaggccctttcccacatggtgaggaattcacaggccaaggcgatgtgctcaccccaagccctaccctttgctagacactcgtctgatgcctgctgctgtagaatttctgctccaagagtcctgccgtgctggcttccagggctggctgccatctgtcctcctgaggacccatgtcctcctgccttaagcagtggttttgggaaagctgggtgtgcaggctgggatgtgtgcccactttgtgggagatgccctgaacgtgctgagtggagctggaagtgggaaaggaggaggggtgggtcatgggcagggagctgtggtcttgggttccagggtgggcttgccccatgctgctactttgaggagcagaatgcagaggaggttgagaattctaaattcaaacctaacattttagtttgtcacaaggacatatttgccaggacagaggatagaccatatttttaaattttattttatattttattttaattttttttgagatagagtctcgctctgtcacccaggctggagtgcagtggcgcgatctcggctcactgtaacctctgcctcccgggttcaagcaattctctgcctcagtctaccgagtagctgggattgcaggcgcccaccaccacgctcggctaatttttgtgtttttagtagagacgggatttcatcatctcggccaggccggtcttgaactcctgacctcatgatccaccttcctcggcctcccaaagtgctgggattacaggggtgagccacctcgcctggctgatagaccattttttaaggtcgttagttcgatgtgcagctgttaaatcttcagacttaagttatggagagtgagcctccctttctactcttgccctggaccccacaagtgttaggggtgagcctggagagagagataattgagattggtgggggcttggtggtgtggccccagcagactgaggctgagttgaacagggagttttgaacattggacccttctagagtagacttttccgggccacgtcatacagggcttaccttctcttaggtctgtgcggtgtgtaggtgtcatctgcttgccatctcctttctctggagccccaggagagctgtacagtgagtatgcttccccaacacatcttagatagcactgttatcttagacagctgttttggggcatgacaggtcatccttccaatggggcctttctctgatgtcaaaggtcaaatcctcctgttagcattccatcttgtctttctcatctcttcaagttaagagagtcccagggaccctccccattcttctgccactccatggctctcctcttcctgagaagcacccctctgcagggagccccctgagtaaactggtagggtcatgtccattccaaactgcacaatttcacgggggaaaatggaaaccctggagtgtaactgggatgttgagtggggctgctttattctaaaagataaaactcaaggacgtcatgctctctgtcttcaaatatctgaggggctgtcatgctgaaaagggaagggatttattcagtgttgttggagtgtgaaggaagaggtggattaaaattcagtgtgcagagaagacttttgccaaagagtgctgcttagcactggctggtgctatctttggagggggtgagcccgctgtcactggaggcgtgcaagtatccctaaaggatatttaatagggaactcatgatctagagagtggggggacaccctactgtacagcatctaaacctctcatccccaataatctgtagctttaggattgttttaaataggatgccaggagttgggaaaggaattaaagaaattcactgaagtgaggaccaagctataaaaaaaaaaaatctttatttcatgtaccaggattttttttttcagttttctgctttttaaaattttttttctgttaacagtctgaaaaaaaaaaaaaggactcaccaagaaaataaatggaggttagtttcttgaactggtctgagctggacatgagcaatcatccacacccctgggcagcaacgcccttgcagttccggtcctggctccttccctccggaccccctagccccttctcagccatggcgatgtcaccccacaccccagtggctttcttcaagcacacccagaacccaggccttgcgccatggaaagaagcactgatcgccttcccagacgctctgccagaattcggagaactggagctagtttttctcttcagacagtgctcgcttgggtgcggttttcttggggaccctcccttctcccttcgctctcatccttgatccctttaggtctggaatctggtgggatggcgggcaagattggggtgggagaggggtagagttcagtttctgcccagactgagggcaacttggttgttgttaccacaccttgaattgtctcccattgttctgccccagggcccatgacctccccctgtacttctgggctgggctggccgatgttctgccccttgctgacctgggaaaataactttcctttcccaggcaaaagacaggaaaggcaggtgagatgtgcaagctcaaaaagccttactagccattctctagaactccccagagagctcaacctcaggaaatgccggtgtcaagaaaaatgcaaaccgggggagactcgcaggcagaggcaggggggcctcaccttgaccttcagtcacctgggagtaacttgcagactgttctgaaatttccagctcaggaaagctgttggatttctgtcagtctgaactggcccttgtcactctggggaagaaaggggagaaacacaggatgcccttgacctttagtctgtggtgcaagtttaacttttggggttggtccttacactgggatggaactgctaaaattttcctctccattccctcagccttgagccctcccagtaaacctcagaggatcctctttttcacagacccccaaagacactggggaagccctggtggcagagctcttctcccaaggaagcctctttaactctccatgatcgcagcaaggggacacaaagtgaagaagggctttggggacccctgcgtctttcccctctttgcctgaacagctttatgtttgctcacatgtgtgtatttttgctttgacattggatgtgggggcaggtgttcggggagcacagtgaggaggtatatggtgtgtgtgtgtgtgtgtgtctgagaggctgactgatgatgagcctgggggcttggtggcagctgtcctggtcatccctggcatatcctcggggcaggtggcagatcttaagtcacagatacatagagcaagaatgggcctttagtgcttctctgggtcaatccacatgcttacatggggggaaaattaaggcccagagaggccatgcagcaaggaattccggaatccagtcctggattctagacgggtgcccttcccatgcatgcgagtggtgtgtgtgtgtgtgtgggtatgtgtgcgtgtgtgggtatgtgtgcatgtgtgtgttcatgtgtatgctctgttgggaggttgtgaatgaacacaaaggccagtgtggagttgttgtcgtccatggctttggagggcatgagtcaatttcctttgagccacgcccctggccgtgtatgggatggaagggttgagactgagtgtgtccctgtgagtgactgcagtgctgggctaagtggactgtgtatgtgtgtgtgaacgtgcctgtgtgcgtgtggggtgtgtggtctctttctttgttggattctgtcttcccccattcgcagcaccttccttgtctgaggaagccacctttccatcacagagaccccctgcagctcactgggaccttccgctactccctccaaccttcaagcccagctctcacctctcacaacggttttgctttgtttttgtaaatggatttgtatattcgttttctgttttttttttctttacaagttccctgctaaagtttaagtcccccaccccgccccattttttgttttcacagtttaaagctggaaaagaattaaaagaaaaatactatctgattttcttgcaagtaaatccacttattttgtatttacatttatttatagtctgtggtttttttattaaaaaaaaatcaccacttgtttttcctttttcttttgtaaaaagaagcctttttgcagtgtcattgttgaacccgctgggccccaagggggcatcagtgagtccaaggacccccaaagggtcaatgaacccccttcccaggggactggggggcttatgagtcagggggtccaccatcgccccagggtcatcaggtggccctgaggtgaggggtgaggagggagagctgtttcatgtcccccgggggggggggtggcatctcctgaccccaaggacaggagcttggggacatgaccccaagaggctcaccctgaggattccggggtttccggcatcttggtaagccaccggcagcctcccctctccttccctttcctcaaggcctaggaagtcatcacagtgggttaaggagcattaaggactgggaacctggggccaggcaagccccaagtgtacccccctccaggcaccctaacggagaggagggacaagggctcggtcacctggaggcctacgattgccccatcaatgctgggcggagccggctcgagctctgagccttcctggagttcctggggcacccacccaggggctccagggacctggcagtgactgcaggctcacctggccccagggcccctgagtctcgccccccaatctcccagggaggcagggcccgctgggggttaaagggaacagaaaagtaactctccccgagttaaaaaaaaaaaaaaaaagtaacataaaccctgaaaaatacaaaggacatcccctttcctttctgttctcattttttttttttttgctttaatgttatcttggttcccttttattttttcatttaaattgatttttattaaatgttaaaataatggtacatgggaaatcatgcattttcttttagatttattttctatttttaattttttatccctctcgcttttttttaaagtttgttttcttccctcgtttatattttcccacatttcctgttgttttgcttctttgttcctcttatattttgttcttttttttaaaatttacttgttatgttttttctctttttttgtgtgtgtgtgtttttttgttttttgtttttttgttttttttgttttttgtttttgcttttggaaggtctcccagcggagggtctgggtctccccgccccgccccgcccccggggaccgcgccctcctcccgcggtcttctggcgaggcccgcggtctttatacgggggtggtccggcggttggctgtgttggagtggagagagtccttgttctccttctggatacagttgtgaacctggaggaagctgttatccctgtcggagttgtaggtggcggtgggcgtggtggcggccttcagggggtccctgctgagcgtgtacatggagatctccgtggacggcagggtgttgaagcccttgatgcccacgggggaggcgtccctggagtgtgagggctccgtggagcgcgagctggagcggctgcggcgctggtagcggtagcggtagctggggatgcgggtgatggcagaggcctggaggtagtccgtggcgcgggccgtggcccgcagctgtttgtgccggtcgataaacatgtgcaccgccagcaccccgaccatctcggcgatgatgaaggacagggccccgaagtagaaggaccagccgtatgagtaactattctttttggagtcgctcttggaggggtctccggcattggcagatatgtacactatgatgccaatgatgttactcagacctgcggggcgcagggtggcggggtgggggatcagagagaaggacgttagtttctcaggaagtcggccacagggcagccgtaaaggacggggacagctgtgtgggccttccccggtcccgcgccttcatgaacaggtggggcggtgtagatggacatccgcaagcttccccttaacattttatctttccattcagagagagccacaagggaagcgctaatggaaacagacatgggcagggcgggagaagggaggcatttcacaaggcgctgagtaactaataatagatattgttcattgagccttctctacctgctttcactgcttggtgcttctcaagcagggcacagatgaggaaacaagcacagagaggttaaggaacttgcttaaggctgcacagggcttcaaagctggtgtagcagcgggtgaaggcgggctgatggagccaggctggcctgcgttcaaagccttcgcaagttaaccttggtttgagtttccagatctgtagaatgggagtaaggttaagccttactctttagggccacggagagggttaaatgggtgaatacatgtgagtactcttagatgttggtggttcctttttttttttttaagatacagtcttgctctgtcacccaggctggagtgcagtggtgtgatcacagctcactgcagtctcaaactcctgggatcaagcgatcctcccaccttagcctctctagtagctgggattatgtatgcgtcaccatgcccagctgattaaaataaaaaaatttctgtagagacgcggtcttgaggcctcgctgtgttgcccaggctggtctcggactcctgagctcaagtgatcctcctgtctcagcctcccaaagtgctgggattgcaggcgtgagccactgcacccggcctgatgttggtcattcttattaaatggctcaggctacacccaggttctttttctggcatctgaagtgagtgtgactcatctgtcatgtaactgggctcagacatctggatgtgggtgcctgcctgctcccacctgagtagaacagtgaggggagagtccacccttggtttccaaggtgaagctgagtatcccataggggttggaacagcgaggcacttgggtgccctctctccagcctcctcatgggtttacttgcaccgggaagggaaagggtaagtggcaattggccaagtaccctgagaggaagcgggcatttgggccttttctcaagtggtgggaagaagatggggtgtggggatgctcctggaggatttggtacaggctcgggagttgctacaggacaggagcccccccaccaccttcctcccctgcaacacgacctagtgcaagtcttggagatttcctctcctctctccccatctctctctgccaggccctcgtggcccctgagcacccacaccccagccttcttcccagtggcaggactggatcagtggctgttacctgcagacacgaagaagatgccggcactcaggatgatgttgtgtcgagttttgtagaactcgctggctgcgatgcagaggccacccatgaaaagcagaatcacactcaggattgggaaaatgctggaggccctcacggcccctgtggaacacagagggtcagggagaaagagaacggcatggctgtgagactgaggcacacagaggcaggtgggagagcagccccgaggcgctgggggtttatggacacagccttagaggagaggttgctttgcaatcctagggagggagagacagcgagcaggccactgcccagctcacagccctgcaggagctccccactgcctccagggccaaactccagcacaccgtcaggcacacagggccctgtgtgacttggcctctgcccacttccagctcccacggctcccagtcctcatgttctctctcgtcccaccacatcaaacttcccacgacatgtcatttcatgctgctgacttttgaaatacagagcttcctactggaatgtctttcctattcttcactcagcaaactcttcttcatccttcaaaacccagctcgaagtcccctcttctgtaaagccttccctgacttccttaggcaaagttatgagctccctcgtctgcactttggggcccttgggcacgctgagaggcagtgtggtatagtggttaggtggaaccacgtgggttggatttgagtctggctgcagcatttattagctgtgcaatagaaaaagtatctcacctctgtgtgcctcagtttcctcatctgtaaagcagggatggtaataatgccaagctcctaagattgttgtgaggattaaatgagttgattcaggcaatgcacttagataagtttctggtgtctataataaacattcaatgcatgatattataataaatatttgtgtatacatatgcttccaccatgaaccatgggtcgtgagacaaggactgtggctttacaaagaaaaagtttcttgtctttatcctctctgttcaacgacacagtagtctgccaatagaagctcattaagtgaataaatgtggggtcgtggtccagaaggaaggaacaggcacattgcaaagaaaacaaagtaagaagagaaacccctctagataaggactgacaaacaggaccggagaagaaaagaatatggtaatgaaaagggagaaacagaaggtgagggccagggctcctacagttgggggtggatgggggaaaagggggacaggtggctaagggcagaggtcggggctacatgtgtttgtggggggagcagcacctgaatgaggacccagaggtgttggggagcccttcacaaagtgtctttgcgaagtaaaacattttttttttaatccaaattcaaataggcagtgagtgacctcaggacccagctccgtgtcctgggagccatgggctaggcaggaggcagagctggcttgaggcaggggtgagggaaaatatgtcttctttattattattattttttgagacggagtcttcccctgtcacccaggctggagtgcagtggtgcaatctcggctcactgcaacttctgcctcctgggttcaagtgattctcctgcctcagcctcccaagtagctgggactacaggcgtgtaccaccatgcttggctaatttttgtacttttagtagagatggggtttcactatgttggccaggctggtctcaaactcttgacctcatgatctgcccaccttggcctcccaaagtgctgggattacaggcttgagccaccgtgcctggccaaagatgtcttctttaaatggtgcttaagtggtttctaaggaagttgagtcctgataattacaggaccctttggccaagcccagggattggtcagggaggttggttttggaggggaatgtgccaggagcggagcttcctcttatccccatccccgtccccacccttttgggtgggagtgtgttcaagaaggatctgtgagaagagaatttctctatatagaactgtagggatttttctttttcttttttaaaatttatttttatttttattttttgagatggagtcttgctctgttgcccaggctggagtgtagtggtgtgatctcggctcactgcagcctccacctcccaggttcaagcgattctcctgcctcagcctcccaagtaggtgggactacaggtgtgcgccatcacacctggctagtttttgtatttttagtagagacggggtttcgctatgttggccaggctggtcttgaactcctgacctcaagtgatctgcccgcctcggcctcccaaagtgctgggattacaggcgttaaaaggggattttaggcagtttgctgagatgtgtgtgatgtgaaaactcttcttctgtcctcaccatggatctgcagcatagtctacactgctcacaaatgggtgagtgggttatttgggggggacctgaagaagggcagggctcttggggcaaaactgagctgcatatagggaagcaggggtgggaggatgggggcttggggtggctgggctactctgcagcctcagcaccctccttctcttgggcgggatggggctgctcctccacagaccccagggaggtgttctctccttgcaaatcattgctaagacaacacgctgtatccctaacctgatcccccagcccaaacacacccacatccacacccacgcgtgacagacatgcatgactaaaaagccaccttaactctcatctttataagcacatgaggatggtgagagcttactgaaaacccaggagaagagagagaatatttgttaaacacccattcggtgttgggtcttgagcaggtacctaacatatatgatataatttcatcctcataacagtccggcagggtgtgtttttttgccccaatttacagacaagaaaattgaggttcagagagagaaactcccctgccacccagctagtgaaccaggattcatatccagaccagctcaacttttggagcaccctgtagtctccctatgtggcttccaaggagcccaggaagggtgagtgccacagggcctggagaactgggtttgggtcccacctgtgccactcacttgctgtgtggctaaggcgggtgctcacttcctctgtttttcccctgtgtaacatggggtatggcctgttagatggtttctttttgtttgtttgttttagatacagagtcttgctctataccccaggctggagtgcagtggcgtgatcttgactcactgcaacctccgtcttcggggttcaagcaattctcctgcctcagcctcccaagtagctgggattataggcgcccgccaccatgtccggctaatttttgtatttttagtagagatgggttttcgccatgttggccaggctggtctcaaactcatgacctcaggtgatccaccggcctcggccttccaaagtgctgggattacaggcctgagccaccgcgcccggccgttagatagtttctaatagctctgccctttccatgtggacatggtcctggccagccacaaaggggaatgacagaagagagaaggaaagaaagaaagaggtcggtgtggcttccgaggcgcagcagcagcagctcagaggaacaggcagaagaaaggctctggccttccccctccaagaaagtggggtcttactacccacaggatgcctgcaggtcgccgacccaattgtgccctcacagcaaatggactcacagcagcccagggcttgatttttccagttgagccccatctgctgtgggaacccggatgccccagctcagccctcctgccagcagggggagggagcgtcggctgcggagggagctgggatgcatgcgtgtgggcagccagaggccaggcatgtgtggacaagatggagggcggcgggagagcagggaggggtctgctgtgttgcagccagcaaagagcaatgtggaggaatcagaacggcttcagaagccaccaaggcagcgtatgacatgctctaaataatgaccaccagcggggaatacaaacagaagcctcttcggcacagaagagccagccccaagctctggcctttcgtggaagaggcctctttgcccagaaagaaggcaacaggccgggcgcggtggctcacgcctgtaatcccagcactttgggaggcagaggtgggtggatcacctgaggtcaggagttcgagaccagcctggctaacatggtgaaaccccgtctctactgaaaaaaacacaaaaattagccgggcatggtggtgcgtgtcagtagtctcagctactgggggtgctgaggcaggaagatagcttcaacttgggaggcggaggttgcagtgagctgagatcgcgccactgcaccccagcctgggcaacagagcaagactccatctcaaaaaaaaaaaaaaaaaaaaaggcaacagtgggcaaccagcaaatagcaccatgcttaggccactagacttggcagggcccagatccaggtgggaaggaagctggtttaggagcaagcagggacttctacattggagacgtttcttgaaggaggtatttctggctgggtagtgtcacaaacggaatggggattttggagttagtcacacttgactttgaatcctcgctttgtcagttatcaacagtgtgacccttgggcaagggtcattactgctctgagcctcagtttccccatcctgtgaaatgggaatagtaaaaataatatttagcttataggaatgttgtaaggccttgctgctgcaagtgtggcctgaggcccagcggcattggcatctgattagaaaggcagccctgccaggcatggtggctcatgcctgtaatcccagcactttgggatgctgaggtgagcggatcacatgaagtcaggagttcgagaccaacctggccagcatggcgaaaccttgcttctactaaaaatacaaaaattagccgggcgtgacggtaagtgcctgtaatctcagctacttgggaggctgaggcaggagaaccgcttgaacccgggaggcagaggttgcagtaaactgagatttcgccactgcactctagcctgggtgacggagcgaggttccatctcagaaaaaaagaaaaaagaaatgccgcccctcagctctttcccccaactgagtcataatctccattttaatgagatccccagagcaagatttgcatgcatatgaaagtttgagaagtgctgttataagaattaaattggggctgggctcggtggctcacacctgtaatcccagcactttgggaggccgaggctggtggatcacttgaggtcaggagttcaagaccagcctagccaatatgatgaaacctcgtctctaccaaaaataaaaaaattagctgggcatggtggtgcacacccatagccccagctacttggggggctgaggcaggagaatcgcttgaacgcgggaggcagaggttgcagtgagccaggatctcaccactgcactccagcctgggcgtcacagcaagattctgtctcaaaaacaaaaaaaaaaaaaaaaagaattaaattgggtcctaccttttactgtgtctcacactagaagttgcacagtaaaaggtagcaatttttatttctgaggtccctcttcccaaaacatcagtccaggcataacttccctataaattgtcctcacttcctacaaagccaagcatggtcttgttgccaaaatctatcacaagagtcaggaaatatctgatttatttaatgaacaaatatttactggtctcctatgagtaagcatatggcacttcacattacctgacaacatttatggagcccctcccctgtaccaggccttgttctaagagcggtgtaaacctcataccagccccatgaagccatgggctttggcttcaaggagattacacacgcctaaagctgacactggcaaacttgttctgtgaagggaaagacagcaaatattttcatctttgctggccatatggtctcagttgcaatttcttaactttgcagttgtagcacataaacagccataaacaatatgtaaacaaatgaacgtggttgtcttccaataaaactttatttacaaaatcactttgggaggccgagggggctggatcacttgaggtcaggagttcgagaccagcatggccaatatggcgaaaccccatctctactaaaaatacaaaaattagcccggcgtggtggcgcatgcctgtagtcccagctactcgggagcccgaggcaggagaatcgtttgaacccaggaggcagaagttgcagtgagctgagatcaagccactgcactctagcctgggcagtgggtgacagagtgagtgagactccatctcaaaaaaaaaaaaaaaatcaggtggtgggctggatgggctggatttggcctgctagtcatacttggccagctgtggccaagagtatactctatactggggaaaaggccacgtggtccagagcagggagatgctttgctctaggctagctgtgaatccagtgagcaaatatggactgagtgcccaccgctgtgctagacctgggcttggcatgagagacatgaggggtccaaaacaggcctggttcatgtctttctagagcttatactctcatgaaggacatgtatgccatcagataatcacacagcctggataacgtgctatgaaagaaaagtacctatatggcaccatgagggtatgtgacaggctaatgtcacatgtagacaactaatgtccatagagagcttagagtatgccgaggactgttttgagcactgcacatacacaaactcgttagttctcattacaactctgtgaagtaagtacttcatattatttttattttttaaatttattttagttctacttattgcattatcttaagcagcatataatagtatggcctctgaaatgtgatagacctggattcaaatccaatgcttttgttttttactttttaattattattattatttttttgagacagagtcttgctctgtcacccaggctggagagcagtggcgtgatctcggctcactgtaacctctgcctcctgggtttgagtgattcttgtgtctcagcctcccaagtagcttagattacaggccatgtgccatcacacctggctaatttttgtatttttagtagagacggggtttcaccatgttggccagcctggtctcgaacttctggcctcaaatgatatgcctgcctcagcctcccaaagtgccgggagtgcaggcgtgagccaccacacatggcctatataggtattttaattatccccactctacagagaccaaactgaagcaaggagaggttaagccatttgttcaagatttgtgaatccaggcagtctgactctagggtctgtgtgtctaaccactgcattcccttcttttcaggctctacactttgctgcccttcaaagcatcctctgagcttatgtggggatcaggacaggtctccctgaggaagtggtggtagagctgacctctggcgaataaggagcagctgattaggcacaatgaaggcagggctgtgggagagagagcagcaggagccgaaggtggaggaggcatggctccttcagagacctggaagaaggctggatcacgaggagccagtggaagagtgtggggagcactgaagggaggagccagtggaggagtgtggggagcacctaaggagaggaggcaggcgggtctgggccacgtggggcctcatgagttgagctaaagagcttagctttatcccaagagcaatgggaaactttaaagggcttagaacaggcagggctgtcatgatctgatttgcatcttaagaagcaaacggattacgaaggggtcaagggtggctccagggaagcagtgagaaggctactgcagctgatcggagaggagtgatgccggtgcttgggccagggtaggtacaaagggcatggacagaggcagatgtgtctgagagatgtttaggaggtgaattgaagcttgatggatggatatgggtagtgaagagggtggcgttgaggttaacttctaggtttcagacttgccagctgggtggaaaaaaccacttagggggactgggagaggacccagcctagcagtgagtagagagtaggggaggagcctgggcgaggtggctcacgcctgtaatcccagcactttggaaggctgaggccggtggatcacctgaggtcaggagttcgaaaccagcctggccaacatggtgaaaccccatctctactaaaaaaatacaaaattagccaggggtggtggcgcatccctgtaaacccagctacttgggaagctgaggcaggagaattgcttgaacctgggaggtggaggttgccgtgcaccaaaattgtgccattgcactccagcctgggcaacaagagcggaactctgtctcaacaaaacaaaacaaaaccaaaacaaaacaaaacaaacaaaaaaagagactagaggaggaagatc

SEQ ID NO: 27 - DNA, 2406 bp, Human
agtttactctacatcatagcagagaaaatggacaaaacacagctgttttgcatgtaggagaatactaaccctgcacagattgtgatggtgatgtggaatatactaaagcctagaacgcacctcctctgcatgactaatatgttctgcacaagacatgaaggcacagacagcactgtctttcttcctcattctcataacatctctgagtggatctcaaggcatattccctttggctttcttcatttatgttcctatgaatgaacaaatcgtcattggaagacttgatgaagatataattctcccttcttcatttgagaggggatccgaagtcgtaatacactggaagtatcaagatagctataaggttcacagttactacaaaggcagtgaccatttggaaagccaagatcccagatatgcaaacaggacatcccttttctataatgagattcaaaatgggaatgcgtcgctatttttcagaagagtaagccttctggacgaaggaatttacacctgctatgtaggaacagcaattcaagtgattacaaacaaagtggtgctaaaggtgggagtttttctcacacccgtgatgaagtatgaaaagaggaacacaaacagcttcttaatatgcagcgtgttaagtgtttatcctcgtccaattatcacgtggaaaatggacaacacacctatctctgaaaacaacatggaagaaacagggtctttggattctttttctattaacagcccactgaatattacaggatcaaattcatcttatgaatgtacaattgaaaattcactgctgaagcaaacatggacagggcgctggacgatgaaagatggccttcataaaatgcaaagtgaacacgtttcactctcatgtcaacctgtaaatgattatttttcaccaaaccaagacttcaaagttacttggtccagaatgaaaagtgggactttctctgtcctggcttactatctgagctcctcacaaaatacaattatcaatgaatcccgattctcatggaacaaagagctgataaaccagagtgacttctctatgaatttgatggatcttaatctttcagacagtggggaatatttatgcaatatttcttcggatgaatatactttacttaccatccacacagtgcatgtagaaccgagccaagaaacagcttcccataacaaaggcttatggattttggtgccctctgcgattttggcagcttttctgctgatttggagcgtaaaatgttgcagagcccagctagaagccaggaggagcagacaccctgctgatggagcccaacaagaaagatgttgtgtccctcctggtgagcgctgtcccagtgcacccgataatggcgaagaaaatgtgcctctttcaggaaaagtataggaaatgagagaagactgtgacaactcatgacctgcatccttaatatccagtgacttcatctcccctttcttcaccacaattccaggcaatggcctgtcggaccagacaattctaccactgcaaagagttgtaaccattttctggtatcacatttatttttcaagacatacttttcaagacatcattcactgacccactacctgcattgagtataaatgcctggatgttaaggattccaatttaactttgaaaagaactgtctcattcatttacatttctgttacagtcagcccaggaggttacagtgagctctccactaagaatctggaagaaatgcatcactaggggttgattcccaatctgatcaactgataatgggtgagagagcaggtaagagccaaagtcaccttagtggaaaggttaaaaaccagagcctggaaaccaagatgattgatttgacaaggtattttagtctagttttatatgaacggttgtatcagggtaaccaactcgatttgggatgaatcttagggcaccaaagactaagacagtatctttaagattgctagggaaaagggccctatgtgtcaggcctctgagcccaagccaagcatcgcatcccctgtgatttgcacgtatacatccagatggcctaaagtaactgaagatccacaaaagaagtaaaaatagccttaactgatgacattccaccattgtgatttgttcctgccccaccctaactgatcaatgtactttgtaatctcccccacccttaagaaggtactttgtaatcttccccacccttaagaaggttctttgtaattctccccacccttgagaatgtactttgtgagatccaccctgcccacaaaacattgctcttaacttcaccgcctaacccaaaacctataagaactaatgataatccatcacccttcgctgactctcttttcggactcagcccacctgcacccaggtgaaataaacagctttattgctcaaaaaaa

SEQ ID NO: 28 - DNA, 530 bp, Human
tgtttttcacacactggatgtttattattagaaaatagcttctatcagctgtcagtaccaaacaagttgaaaggagcgagcttctcaccatatttttttttctccttaatgatatttaaataaacagctcactgtgtgagctcacgccctttttccctttaaaaactgaataattaaatgaagtttagtacaaaacattcttcaaatatgacttgttctgcatctgttatgctgtctccttgagtaatggacgcgaaagagatgaaaaagaccactcaggctaccaaagtaccccaaagaatccatacgagaaactgagaaacaaactaactcaaataagacccaaccaaaccaagaaaccagtttttacgttgactttttgattttgattatcatctaagtttaatatatatatatatgtgtgtgtgtttgaaatagtaataaaaaaggaagaattgaattgcatccgtagcaggacaaccttcctcatacgttaaagaggtgttcagaaaattccatacagtatctgc

SEQ ID NO: 29 - DNA, 1785 bp, Human
gggggaattatgttgatgactattctctctattctctctctctctctttttttttttttggagatagagtcttgctctgtcacccaggctggatcttggctcgctgcagcctctgcctcctgggttcaagcgattctcctgccttggcctctcgagtggctgggattgcaggcacctgccaccgcgcccggctagtttttgtatttttggcagagatggggtttcgccgtgttggccaggatggtctcgatctcttgacctcatggtctgcctgccttggcctcccaaagtgccggaattacaggcatgagccaccacacctggccactgttctcaaattgtattatggagtttttttttttttacaaaatatggatatattttaatttactcaaatgggaactactgataagcagttcttatttttccagcataagcaaggctacaataaatatctttgaatatatgtactgatgctttttgttttttgttgaagctatatcccaataagtgataagtacggtctaagagagaacatgttttttacaattttgattgatatcatattgggccacgcatggtggctcaggcctggcatcccggcactttgggaggttgaggtgggaggatagcttgagctcaggagttcaagaccagcttgagcaacctggtgagacctcatctctactaaaaaaacaaaacaaacaaacacaaaattagctaggtgtggtggcatgtgccagtagtcccagctagttgggaggctgaggtggaaagattgcttgatcctgggaggttgaggctacagtgagctgtgatggtatcactgcactctatcctggacaacacagcaagaacctgcctcaaacaaatgtatttggttgatattgtatcagatttcttctgaaaaacgttttaatggtttagactttcaccaagtgcaagaaactggcattttctttgtaactggcctggaatgttaccactcttttaaacttttgtcaagatgatcgtgagaaatagtatctaattacttcaatttgcatttccctgactcctaatgaagttcagcatctcttcaaatctttattgggcatttggattttctcttcagtgaattgcttcatcatattctccatttattctaaagttgtgttcctatttgtcgctttcaaatctagtttggtggaatccttgcatgttagaaaccttaaccctcgtaatatgtgttgtagatatttttccctcgcctatgagttgtctttcatccttgagcatgagttttagagtcagaagaacaacagtaggatttgaatcatgttacgttattttctagttgtcgtattttttatttcttcagcctcttagaatcttagtttcctttaaaattgagataatagtatctactttattcaaaaaaattttttggctggacgcggtggctcacgcttgtgatcccaccattttgggaggccaaggcaggcggatcacctgaggtcaggagtttgagaccagcttggccaacgtggtgaaaacccatctctactaaaaatacaaaaattagccaggtacagcggggcatgcctgtagtcccaggtactcgggaggctgaggcaggagaatcacttgaacccgggaggcagagatgaggtagtgagctgagatcgcaccactgcactccggcctgagtggtagggcgagactctgtctcaaaaaaaaaattgttttttcatttatttgtttgttgagactccacttcaaaaaataaaaaaaaaaaaaaaaaaa

SEQ ID NO: 30 - DNA, 2653 bp, Human
gaagttacaagagtagtagatgaacaactaaaggcgttgcttgagtccatggttgatgctgctgagaatctttgtcccaatgtgatgaaaaaagcccacattcgacaagacttgattcatgccagcaccgaaaagatttctattccacgtacctttgttaaaaatgtcctgttggagcagtctggaattgatatccttaacaaaattagtgaagtaaaattgacagtggcctcgttcctgtctgatagaattgtggatgaaatcctggatgcactctcacattgccatcataaactggctgaccatttcagcagacgtggcaagacccttcctcaacaagaatccttagagatcgagctggctgaggagaggccagttaaacgttccatcatcacagtggaggagctaacagagatagagcgtttggaagatctggatacctgtatgatgacccctaaatccaaaaggaagagtatccatagccgaatgctgcggcctgtttctagggcttttgaaatggagtttgatctagataaagcgctggaagaggtaccaattcacatcgaagacccgcccttcccatccctcagacaggagaagcggagctcgggatttatctctgagttgccctctgaagaggggaagaagctggaacactttaccaagttaaggccaaaaaggaataagaagcagcaacccacccaagcagcggtctgtgctgccaacatagtctcacaagatggtgaacagaatggtctcatggggagagtggatgaaggtgtagatgaattttttaccaagaaggtgaccaaaatggattccaagaaatggtcaacaagaggctcagagtcccatgagcttaatgaaggaggagatgaaaagaaaaagcgagattctcggaaaagtagtggctttctcaatttaatcaaatcccggtccaaatccgagcgaccaccaacgatcttgatgacagaagaaccctcctcaccaaaaggggcagtcagaagtccacctgtggactgtcccaggaaggacacaaaggccgccgagcacaatggcaattctgaacggatagaggagataaaaacacctgactcctttgaagagagtcaaggggaagaaatagggaaggtggaacggagtgacagcaagagcagcccacaggcagggcggaggtatggggtccaggtgatgggcagtggtctgctggcagagatgaaagccaagcaagagaaccgctttggtttgggaacaccagaaaagaataccaaagcagaacccaaagcggaagcaggctccaggtctcggagctcatccagcacacctacgagcccgaagcccctcctgcagtcccccaaacccagtctggcagcacggcccgtcatcccgcagaaaccaagaaccgcctcacggcctgatgacattccagactctccatctagcccgaaagttgcccttcttccacctgtcctgaaaaaagttccttcagacaaagagagagatggccagagtagcccccagcccagccccaggacattttcacaggaagtttcaaggagaagctggggccagcaggcccaggagtatcaagaacaaaagcaacggtcctccagtaaagatggccatcaaggcagcaaatctaatgactccggggaagaagcagaaaaagagtttatttttgtgtaaaggtcacccacgcagaagtcttcctgtgcagggtgctttggtagccatcagagaggaaccaagggcaacatcttttcttcccaggcgttcttctctgggtgctttattctcttctttttctttatttcgcccccacccccatcccctgccttttttttttttttttttttgtatagaaacagatccatttcttggtaatcaaagcacatttgtttggtcttcctccaaccctttgcatttgatttctaaacattccttcatatgcctttaatgaaagccagcaattatcccatgggccctacttgaatttatctgaggcagctacagattgccctgcaagatgagtttttggagataaatgaaataactggacacacactcacacaagtaacaccacagcagacctcggagtactgctaagtgtacctgtgtcaaatccgcacaggactcaatatagcaatttattcttgatgtatgcaattgcacattgtaattatattaacagagcacactaataatttgtatagattatatatattagatcttgggtatggtttttaccttctcccatggggaacttcttccttcctgatgtggaattgtacatttaaagcttggtcggtgacctttgcataccatcaacgagcacagctaagaacagagtgagagaggcccatggctgattttaccatgtgcccagattaatgtatatagttgattggaatgaggttttatgaatattcatgtttttgaaggcctttaatttctgtctgcatattagcttttaatgtgtgattttaagagagaatactttgacacctgtaaaaatcaaaatactactctttataagacatttcacaaatattcacttacattacaggctggaagtattttattcatatgtatatttataccaataaaatgattttacaagtggaaaaaaaaaaaaaaaaaaaaaaaaaaaaaa

SEQ ID NO: 31 - DNA, 1379 bp, Human
tgcaagatgcccctgaagctgcgggggaagaagaaggccaagtccaaggagaccgccgggctggtggagggcgagccgacgggcgcgggcggcgggagcctctcagcgtcccgggctcccgcacgcaggctggtcttccacgcgcagctggcgcacggtagtgccacgggccgagtggagggcttctccagcatccaggagctctacgcccagatcgcgggcgcgtttgaaatctcgccgtcggagatcttatattgcactttaaacacacctaaaattgacatggaaagactcttaggaggacaactaggactagaagatttcatatttgcccatgtgaaaggaatcgaaaaagaagtgaatgtgtataaatctgaggattcacttggtctcaccattacagataatggtgttggctatgcttttataaagagaattaaagatggtggtgttattgactcagttaaaacaatctgtgttggggatcatattgaatccataaatggagaaaatattgttgggtggcgtcactatgatgttgctaagaagttaaaggaattaaaaaaggaggaactctttactatgaagttaatagaacctaagaaggcatttgaaatagagctgaggtcaaaggctggaaagtcatcaggagaaaaaattggttgtggaagggcaacacttcgcctgagatcaaaaggtcctgccaccgtggaagaaatgccttctgaaaccaaagcaaaggcaattgaaaagattgatgatgttcttgagttgtacatgggaattcgagatattgatttagccaccacaatgtttgaagctggaaaggacaaagtaaatccagatgaatttgctgtggcacttgacgaaactcttggagactttgcgttcccagacgaatttgtctttgatgtttggggagtcattggtgatgccaaacgaagaggattatgatgtgtacactccatctctgaagaaacaacccatcgttcttttttttctcttttttaaaaagtcctataagatctgtttttggacacctttactaactctggtttaatttcatgtgtatggaatatattctttgaaatataattttggtaattttgatttctgggcactttttaacattgctgatgtagtatgcttaagagaaatgacctaaataaggatcaattgtaatattcattcaaaaggtttttaaaagtaagttttaaggagtatttctcgacagatgattttcttctccattaatacccatgctttgtttttcacatataaatagatgatttcaatagctttgtagttttttttcaaaatcttaatgtaaactaggattggagtatgatttacctcatagtatcttcactgtgttatcc

SEQ ID NO: 32 - DNA, 585 bp, Human
ttttttttttttttaaaaaagagcattttattttaataaagaataaaagagatcaatatactgttttaatggatacaaaaataaatattcattcagcatattaaagatatgtgctttgacattcatttgaattggagattcaagcctattgttatcttatgaacacttcagcaaacaggactgccattcttaaaaatataatgctttgttggacaaaagggacaagccacgtcccctggtcctctcctctattcgcctgtgaactccatccacacgtaaaggacctctgggtctgactgtcccctccacaggcatggtgctgggaaaaggaaacaggcatatctggcttttcagattttaaaccggaaactctcacagtcacaaatccaccatgagacttgggagattggatgagctgtctcccaaaccctaacaccttccaccttctcaaaatgaaggctgccctttcactgggaggttctgaatgcgggatggtgctgactcaggctgggcacaaaggagaaaggaggacatggaaaatccgacaattcaaagtacaaatatttcaaacacatgtgaaaacca

SEQ ID NO: 33 - DNA, 1964 bp, Human
tgatgacaacaatggaagcagtggagtccccggagtccctggccgccgttgcttacctgctgaaccttgtcctgaagcgtgttcccagccctgtgcttattaagaagttctctgatacctccaaagccttcatggatatcatgtcagctcaggccagcagcggctccacctctgtcctccgatgggtcctttcctgcctggccacccttctgcggaagcaagacctggaggcctggggctaccccgtgacccttcaggtgtaccatgggctgctgagcttcacggtgcatcccaagcccaagatccggaaggctgcccagcatggagtatgctcagtcctcaagggcagtgaattcatgtttgaaaaggcccctgcccatcatcctgctgccatttccactgccaagttctgcatccaggagattgagaagtctggaggctccaaggaggccaccaccacgctgcacatgctgacgctgctgaaggacctgctgccctgcttcccggaaggcctggtgaagagctgcagtgagactctcctcagggtcatgaccttgagccatgtgctggtgacagcctgtgccatgcaggcctttcacagcctcttccacgccaggcctggcctgagcaccctgtcagcagagctcaacgcccagatcatcacggccctgtacgactatgttcccagtgagaatgatttacaacccctgctagcctggcttaaggtcatggagaaagcccacatcaacctggtgaggttgcagtgggacctggggctaggccacctccctcgcttttttggaactgcggtgacctgcctcctttccccacacttgcaagtgctgactgctgctacgcagagcctcaaggagatcctgaaggaatgcgtggctccccacatggctgacattggctccgtgacctcctcggcctcaggccctgcccaatctgttgccaagatgttcagggcagtggaggagggcctgacgtacaaattccatgcggcctggagctccgtgttgcagctgctgtgtgtcttcttcgaggcgtgtgggagacaggccgaccctgtgatgaggaagtgcctccagtccctgtgtgacctgcgcctctcccctcatttcccccacacggcggctcttgaccaggcagtgggggctgcggtgaccagtatgggacctgaggtggtgctgcaggctgtgcctttggaaattgatggctctgaggagactctggatttcccacggagctggctgctgcctgtcatccgagaccatgttcaggaaacgcgacttggtttttttcaccacctacttcttgcccctggctaacaccctgaagagcaaagccatggacctggctcaggcaggcagcacagtggaatctaagatctacgacacactccagtggcagatgtggacactcctgcctgggttctgcacaaggcctacagatgtggccatctccttcaaagggctggcacggacgctgggcatggccatcagcgagcgtccagacctgagggtcaccgtgtgccaggccctgcgcaccctcatcaccaagggctgccaggcagaggctgaccgtgctgaagtgagtcgctttgccaagaactttctgccgatcctcttcaacctgtatgggcagcccgtggcagccggggacactccagcccctcgccgggctgtgctggaaaccatcagaacttacctcaccatcactgacactcagttggtgaacagtctcctggaaaaagccagtgagaaggtgctcgaccctgccagctctgactttaccagattgtctgtcctggacctggtcgtggccttggctccgtgtgctgacgaagctgccatcagtaagctatactccaccatccggccctacctagattgctaacaaatcagaaatatgacaattaatgattaaagactgtgattgccaccaaaaaaaaaaaaaaaaaa

SEQ ID NO: 34 - DNA, 2599 bp, Human
aaatccgagcctcgcgtgggctcctggcccccgacggacaccaccaggcccacggagcccaccatgccgcgcccggcccccgcgcgccgcctcccgggactcctcctgctgctctggccgctgctgctgctgccctccgccgcccccgaccccgtggcccgcccgggcttccggaggctggagacccgaggtcccgggggcagccctggacgccgcccctctcctgcggctcccgacggcgcgcccgcttccgggaccagcgagcctggccgcgcccgcggtgcaggtgtttgcaagagcagacccttggacctggtgtttatcattgatagttctcgtagcgtacggcccctggaattcaccaaagtgaaaacttttgtctcccggataatcgacactctggacattgggccagccgacacgcgggtggcagtggtgaactatgctagcactgtgaagatcgagttccaactccaggcctacacagataagcagtccctgaagcaggctgtgggtcgaatcacacccttgtcaacaggcaccatgtcaggcctagccatccagacagcaatggacgaagccttcacagtggaggcaggggctcgagagccctcttctaacatccctaaggtggccatcattgttacagatgggaggccccaggaccaggtgaatgaagtggcggctcgggcccaagcatctggtattgagctctatgctgtgggcgtggaccgggcagacatggcgtccctcaagatgatggccagtgagcccctagaggagcatgttttctacgtggagacctatggggtcattgagaaactttcctctagattccaggaaaccttctgtgcgctggacccctgtgtgcttggaacacaccagtgccagcacgtctgcatcagtgatggggaaggcaagcaccactgtgagtgtagccaaggatacaccttgaatgccgacaagaaaacgtgttcagctcttgataggtgtgctcttaacacccacggatgtgagcacatctgtgtgaatgacagaagtggctcttatcattgtgagtgctatgaaggttataccttgaatgaagacaggaaaacttgttcagctcaagataaatgtgctttgggtacccatgggtgtcagcacatttgtgtgaatgacagaacagggtcccatcattgtgaatgctatgagggctacactctgaatgcagataaaaaaacatgttcagtccgtgacaagtgtgccctaggctctcatggttgccagcacatttgtgtgagtgatggggccgcatcctaccactgtgattgctatcctggctacaccttaaatgaggacaagaaaacatgttcagccactgaggaagcacgaagacttgtttccactgaagatgcttgtggatgtgaagctacactggcattccaggacaaggtcagctcgtatcttcaaagactgaacactaaacttgatgacattttggagaagttgaaaataaatgaatatggacaaatacatcgttaaattgctccaatttctcacctgaaaatgtggacagcttggtgtacttaatactcatgcattcttttgcacacctgttattgccaatgttcctgctaataatttgccattatctgtattaatgcttgaatattactggataaattgtatgaagatcttctgcagaatcagcatgatttttccaaggaaatacatatgcagatacttattaagagcaaactttagtgtctctaagttatgactgtgaaatgattggtaggaaatagaatgaaaagtttagtgtttctttatctactaattgagccatttaatttttaaatgtttatattagataaccatattcacaatggaaactttaggtctagtttcttttgatagtatttataatataaatcaatcttattactgagagtgcaaattgtacaaggtatttacacatacaacttcatataactgagatgaatgtaattttgaactgtttaacactttttgttttttgcttattttgttggagtattattgaagatgtgatcaatagattgtaatacacatatctaaaaatagttaacacagatcaagtgaacattacattgccatttttaattcattctggtctttgaaagaaatgtactactaaagagcactagttgtgaatttagggtgttaaactttttaccaagtacaaaaatcccaaattcactttattattttgcttcaggatccaagtgacaaagttatatatttataaaattgctataaatcgacaaaatctaatgttgtctttttaatgttagtgatccacctgcctcagcctcccaaagtgctgggattacaggcttgaaagtctaacttttttttacttatatatttgatacatataattcttttggctttgaaacttgcaactttgagaacaaaacagtcctttaaattttgcactgctcaattctgtttttcgtttgcattgtctttaatataataaaagttattacctttacatattatcatgtctatttttgatgactcatcaattttgtctattaaagatatttctttaaattaaaaaaaaaaaaaaaaa

SEQ ID NO: 35 - DNA, 3060 bp, Human
tccggaaggaggcgaaccctgaggcgggcccggcaagccttccctgcggccggcagagcccaacgactagtgggactccgcgggggcgggggtagctggagcctggctctggcctggcaggagccgagcttgttccggaagaagccgagcggacgggggccagcctcagcgtcccgggagtgaggcgatagctgcggcggcgacagcgcgggccgggatgaaccgcgacggctgaggcagcggaggtgccggctgcgcgggccccagtgagactccctcgaagcggcagcccaccgttcggggctttgcctcgagccgagccctgcccccgcgagcctcccggacccctttgtgcggccggaggcggcggcgggaacggccatggcggccaacatgtaccgggtgggagattacgtctattttgagaactcttccagcaatccttacctggttagacggattgaggagctcaacaagactgcaaatggaaatgtggaggcaaaggttgtctgtcttttccggcgcagggacatttctagtagcctcaacagcctggctgatagtaatgccagggagtttgaagaggaatcaaagcagccaggggtgtctgagcagcagcgccatcaactgaagcaccgggaactttttctttctcggcaatttgaatcattaccagccacccacatacgggggaaatgcagtgtgaccctcttgaatgagacagatatcttgagccagtacctggaaaaggaggactgctttttttactcactggtgtttgaccccgtgcagaagacacttctcgctgatcagggcgagattagagttggttgcaaataccaagctgagatcccagatcgcctagtagagggagaatctgataatcggaaccagcagaagatggagatgaaggtctgggacccagacaaccctctcacagaccggcagatcgaccagtttcttgtggtggcccgagctgtgggaacctttgcaagagccctagattgtagcagctccattcggcagccaagcttgcacatgagtgcagctgctgcctcccgagatatcactctgtttcacgccatggataccttgcaaaggaacggctacgacctggctaaggccatgtcgaccctggtaccccagggaggcccggtgctgtgtcgggatgagatggaggaatggtcagcctcagaggccatgctatttgaggaggccctagagaagtatgggaaggacttcaatgatattcgccaggattttctaccctggaagtcacttgccagcatagtccagttttattacatgtggaaaaccacagaccggtatattcagcagaaaaggttgaaagctgctgaagcagacagcaaactgaaacaggtctacattcccacctacactaagccaaaccctaaccagatcatttctgtgggttcaaaacctggcatgaatggggctggatttcagaagggcctgacttgtgagagttgccacaccacacagtctgctcagtggtatgcctggggcccacctaacatgcagtgccgcctctgtgcttcctgttggatctactggaagaagtatgggggactgaagaccccaactcagcttgagggggccactcggggcaccacggagccacactcaaggggtcatttatccagacctgaagctcaaagtctctctccttacacaaccagcgccaacagggccaagctactggctaagaacagacaaactttcctgcttcagaccacaaagctgacccgtcttgccagacgcatgtgcagggacctattacagccaaggagggccgcccgacggccttatgctcctatcaatgccaatgccatcaaagcagagtgctccattcgacttcctaaggccgccaagactccattgaagattcaccctctggtgcggctgcccctggcaactatcgtcaaagatctggtggcccaggcacccctgaaaccaaaaacacctcggggtaccaagacaccgatcaacagaaaccagctgtcccagaaccggggactggggggcattatggtgaaacgggcctatgagactatggcaggggcaggggttcctttctctgccaatggaaggcctctggcttcagggattcgttcaagctcacagccagcagccaagcgtcagaaactaaacccagctgatgcccccaatcctgtggtgtttgtggccacaaaggataccagggccctacggaaggctctgacccatctggaaatgcggcgagctgctcgccgacccaacttgcccctgaaggtgaagccaacgctgattgcagtgcggccccctgtccctctacctgcaccctcacatcctgccagcaccaatgagcctattgtcctggaggactgagcacctgtggggaagggaggtgggctgagaggtagagggtggatgcccagggcacccaaacctcccttccctttcgtgtcgaagggagtgaggagtgaattaaggaagagagcaagtgagtgtgtgtccctggaggggttgggcgccctctggtgttaccacctcgagacttgtctcatgcctccatgcttgccgatggaggacagactgcaggaacttggcccatgtgggaacctagcctgttttggggggtaggacccacagatgtcttggacagttttggggggagggttttttaattttttaaaagttttgcctccctttgtgaaaggggatggggaggggaagagtaaacagataacaggtggtggtacctggttgggggaggggggcgtgcactgccatgtctttttttttttttttttttttttttttcctaattgggggtttctctttctgtccggtgtccggactttcctaattggagtttgaggcccctaagctggcatcaaccccaggccacgctcgctctttccttccctcccctccccctctgccttttgtacgccagttctcagaaataaagatcttttgtccgtttttttaacctcggattctgtaattggttcttatagtaacaaataaaaagctgttttcttcagcttctcctgg

SEQ ID NO: 36 - DNA, 15720 bp, Human
caacccacaccgcccctgccagccaccatggggctgccactagcccgcctggcggctgtgtgcctggccctgtctttggcagggggctcggagctccagacagagggcagaacccgataccacggccgcaacgtctgcagcacctggggcaacttccactacaagaccttcgacggggacgtcttccgcttccccggcctctgcgactacaacttcgcctccgactgccgaggctcctacaaggaatttgctgtgcacctgaagcggggtccgggccaggctgaggcccccgccggggtggagtccatcctgctgaccatcaaggatgacaccatctacctcacccgccacctggctgtgcttaacggggccgtggtcagcaccccgcactacagccccgggctgctcattgagaagagcgatgcctacaccaaagtctactcccgcgccggcctcaccctcatgtggaaccgggaggatgcactcatgctggagctggacactaagttccggaaccacacctgtggcctctgcggggactacaacggcctgcagagctattcagaattcctctctgacggcgtgctcttcagtcccctggagtttgggaacatgcagaagatcaaccagcccgatgtggtgtgtgaggatcccgaggaggaggtggcccccgcatcctgctccgagcaccgcgccgagtgtgagaggctgctgaccgccgaggccttcgcggactgtcaggacctggtgccgctggagccgtatctgcgcgcctgccagcaggaccgctgccggtgcccgggcggtgacacctgcgtctgcagcaccgtggccgagttctcccgccagtgctcccacgccggcggccggcccgggaactggaggaccgccacgctctgccccaagacctgccccgggaacctggtgtacctggagagcggctcgccctgcatggacacctgctcacacctggaggtgagcagcctgtgcgaggagcaccgcatggacggctgtttctgcccagaaggcaccgtatatgacgacatcggggacagtggctgcgttcctgtgagccagtgccactgcaggctgcacggacacctgtacacaccgggccaggagatcaccaatgactgcgagcagtgtgtctgtaacgctggccgctgggtgtgcaaagacctgccctgccccggcacctgtgccctggaaggcggctcccacatcaccaccttcgatgggaagacgtacaccttccacggggactgctactatgtcctggccaagggtgaccacaacgattcctacgctctcctgggcgagctggccccctgtggctccacagacaagcagacctgcctgaagacggtggtgctgctggctgacaagaagaagaatgcggtggtcttcaagtccgatggcagtgtactgctcaaccagctgcaggtgaacctgccccacgtgaccgcgagcttctctgtcttccgcccgtcttcctaccacatcatggtgagcatggccattggcgtccggctgcaggtgcagctggccccagtcatgcaactctttgtgacactggaccaggcctcccaggggcaggtgcagggcctctgcgggaacttcaacggcctggaaggtgacgacttcaagacggccagcgggctggtggaggccacgggggccggctttgccaacacctggaaggcacagtcaacctgccatgacaagctggactggttggacgatccctgctccctgaacatcgagagcgccaactacgccgagcactggtgctccctcctgaagaagacagagaccccctttggcaggtgccactcggctgtggaccctgctgagtattacaagaggtgcaaatatgacacgtgtaactgtcagaacaatgaggactgcctgtgcgccgccctgtcctcctacgcgcgcgcctgcaccgccaagggcgtcatgctgtggggctggcgggagcatgtctgcaacaaggatgtgggctcctgccccaactcgcaggtcttcctgtacaacctgaccacctgccagcagacctgccgctccctctccgaggccgacagccactgtctcgagggctttgcgcctgtggacggctgcggctgccctgaccacaccttcctggacgagaagggccgctgcgtacccctggccaagtgctcctgttaccaccgcggtctctacctggaggcgggggatgtggtcgtcaggcaggaagaacgatgtgtgtgccgggatgggcggctgcactgtaggcagatccggctgatcggccagagctgcacggccccaaagatccacatggactgcagcaacctgactgcactggccacctcgaagccccgagccctcagctgccagacgctggccgccggctattaccacacagagtgtgtcagtggctgtgtgtgccccgacgggctgatggatgacggccggggtggctgcgtggtggagaaggaatgcccttgcgtccataacaacgacctgtattcttccggcgccaagatcaaggtggactgcaatacctgcacctgcaagagaggacgctgggtgtgcacccaggctgtgtgccatggcacctgctccatttacgggagtggccactacatcacctttgatgggaagtactacgactttgacggacactgctcctacgtggctgttcaggactactgcggccagaactcctcactgggctcattcagcatcatcaccgagaacgtcccctgtggcactacgggcgtcacctgctccaaggccatcaagatcttcatggggaggacggagctgaagttggaagacaagcaccgtgtggtgatccagcgtgatgagggtcaccacgtggcctacaccacgcgggaggtgggccagtacctggtggtggagtccagcacgggcatcatcgtcatctgggacaagaggaccaccgtgttcatcaagctggctccctcctacaagggcaccgtgtgtggcctgtgtgggaactttgaccaccgctccaacaacgacttcaccacgcgggaccacatggtggtgagcagcgagctggacttcgggaacagctggaaggaggcccccacctgcccagatgtgagcaccaaccccgagccctgcagcctgaacccgcaccgccgctcctgggccgagaagcagtgcagcatcctcaaaagcagcgtgttcagcatctgccacagcaaggtggaccccaagcccttctacgaggcctgtgtgcacgactcgtgctcctgtgacacgggtggggactgtgagtgcttctgctctgccgtggcctcctacgcccaggagtgtaccaaagagggggcctgcgtgttctggaggacgccggacctgtgccccatattctgcgactactacaaccctccgcatgagtgtgagtggcactatgagccatgtgggaaccggagcttcgagacctgcaggaccatcaacggcatccactccaacatctccgtgtcctacctggagggctgctacccccggtgccccaaggacaggcccatctatgaggaggatctgaagaagtgtgtcactgcagacaagtgtggctgctatgtcgaggacacccactacccacctggagcatcggttcccaccgaggagacctgcaagtcctgcgtgtgtaccaactcctcccaagtcgtctgcaggccggaggaaggaaagattcttaaccagacccaggatggcgccttctgctactgggagatctgtggccccaacgggacggtggagaagcacttcaacatctgttccattacgacacgcccgtccaccctgaccaccttcaccaccatcaccctccccaccacccccacctccttcaccactaccaccaccaccaccaccccgacctccagcacagttttatcaacaactccgaagctgtgctgcctctggtctgactggatcaatgaggaccaccccagcagtggcagcgacgacggtgaccgagaaccatttgatggggtctgcggggcccctgaggacatcgagtgcaggtcggtcaaggatccccacctcagcttggagcagcatggccagaaggtgcagtgtgatgtctctgttgggttcatttgcaagaatgaagaccagtttggaaatggaccatttggactgtgttacgactacaagatacgtgtcaattgttgctggcccatggataagtgtatcaccactcccagccctccaactaccactcccagccctccaccaaccacgacgaccacccttccaccaaccaccacccccagccctccaaccaccaccacaaccacccctccaccaaccaccacccccagccctccaataaccaccacgaccacccctctaccaaccaccactcccagccctccaataagcaccacaaccacccctccaccaaccaccactcccagccctccaaccaccactcccagccctccaaccaccactcccagccctccaacaaccaccacaaccacccctccaccaaccaccactcccagccctccaatgactacgcccatcactccaccagccagcactaccacccttccaccaaccaccactcccagccctccaacaaccaccacaaccacccctccaccaaccaccactcccagtcctccaacgactacgcccatcactccaccaaccagcactactacccttccaccaaccaccactcccagccctccaccaaccaccacaaccacccctccaccaaccaccactcccagccctccaacaaccaccactcccagtcctccaacaatcaccacaaccacccctccaccaaccaccactcccagccctccaacaacgaccacaaccacccctccaccaaccaccactcccagccctccaacgactacacccatcactccaccaaccagcactaccacccttccaccaaccaccactcccagccctccaccaaccaccacaaccacccctccaccaaccaccactcccagccctccaacaaccaccactcccagccctccaataaccaccacaaccacccctccaccaaccaccactcccagctctccaataaccaccactcccagccctccaacaaccaccatgaccaccccttcaccaaccaccacccccagctctccaataaccaccacaaccaccccttcctcaactaccactcccagccctccaccaaccaccatgaccaccccttcaccaaccaccactcccagccctccaacaaccaccatgaccacccttccaccaaccaccacttccagccctctaacaactactcctctacctccatcaataactcctcctacattttcaccattctcaacgacaacccctactaccccatgcgtgcctctctgcaattggactggctggctggattctggaaaacccaactttcacaaaccaggtggagacacagaattgattggagacgtctgtggaccaggctgggcagctaacatctcttgcagagccaccatgtatcctgatgttcccattggacagcttggacaaacagtggtgtgtgatgtctctgtggggctgatatgcaaaaatgaagaccaaaagccaggtggggtcatccctatggccttctgcctcaactacgagatcaacgttcagtgctgtgagtgtgtcacccaacccaccaccatgacaaccaccaccacagagaacccaactccgccaaccacgacacccatcaccaccaccactacggtgaccccaaccccaacacccaccggcacacagaccccaaccacgacacccatcaccaccaccactacggtgaccccaaccccaacacccaccggcacacagaccccaaccacgacacccatcaccaccaccactacggtgaccccaaccccaacacccaccggcacacagaccccaaccacgacacccatcaccaccaccactacggtgaccccaaccccaacacccaccggcacacagaccccaaccacgacacccatcaccaccaccactacggtgaccccaaccccaacacccaccggcacacagaccccaaccacgacacccatcaccaccaccactacggtgaccccaaccccaacacccaccggcacacagaccccaaccacgacacccatcaccaccaccactacggtgaccccaaccccaacacccaccggcacacagaccccaaccacgacacccatcaccaccaccactacggtgaccccaaccccaacacccaccggcacacagaccccaaccacgacacccatcaccaccaccactacggtgaccccaaccccaacacccaccggcacacagaccccaaccacgacacccatcaccaccaccactacggtgaccccaaccccaacacccaccggcacacagaccccaaccacgacacccatcaccaccaccactacggtgaccccaaccccaacacccaccggcacacagaccccaaccacgacacccatcaccaccaccactacggtgaccccaaccccaacacccaccggcacacagaccccaaccacgacacccatcaccaccaccactacggtgaccccaaccccaacacccaccggcacacagaccccaaccacgacacccatcaccaccaccactacggtgaccccaaccccaacacccaccggcacacagaccccaaccacgacacccatcaccaccaccactacggtgaccccaaccccaacacccaccggcacacagaccccaaccacgacacccatcaccaccaccactacggtgaccccaaccccaacacccaccggcacacagaccccaaccacgacacccatcaccaccaccactacggtgaccccaaccccaacacccaccggcacacagaccccaaccacgacacccatcaccaccaccactacggtgaccccaaccccaacacccaccggcacacagaccccaaccacgacacccatcaccaccaccactacggtgaccccaaccccaacacccaccggcacacagaccccaaccacgacacccatcaccaccaccactacggtgaccccaaccccaacacccaccggcacacagaccccaaccacgacacccatcaccaccaccactacggtgaccccaaccccaacacccaccggcacacagaccccaaccacgacacccatcaccaccaccactacggtgaccccaaccccaacacccaccggcacacagaccccaaccacgacacccatcaccaccaccactacggtgaccccaaccccaacacccaccggcacacagaccccaaccacgacacccatcaccaccaccactacggtgaccccaaccccaacacccaccggcacacagaccccaaccacgacacccatcaccaccaccactacggtgaccccaaccccaacacccaccggcacacagaccccaaccacgacacccatcaccaccaccactacggtgaccccaaccccaacacccaccggcacacagaccccaaccacgacacccatcaccaccaccactacggtgaccccaaccccaacacccaccggcacacagaccccaaccacgacacccatcaccaccaccactacggtgaccccaaccccaacacccaccggcacacagaccccaaccacgacacccatcaccaccaccactacggtgaccccaaccccaacacccaccggcacacagaccccaaccacgacacccatcaccaccaccactacggtgaccccaaccccaacacccaccggcacacagaccccaaccacgacacccatcaccaccaccactacggtgaccccaaccccaacacccaccggcacacagaccccaaccacgacacccatcaccaccaccactacggtgaccccaaccccaacacccaccggcacacagaccccaaccacgacacccatcaccaccaccactacggtgaccccaaccccaacacccaccggcacacagaccccaaccacgacacccatcaccaccaccactacggtgaccccaaccccaacacccaccggcacacagaccccaaccacgacacccatcaccaccaccactacggtgaccccaaccccaacacccaccggcacacagaccccaaccacgacacccatcaccaccaccactacggtgaccccaaccccaacacccaccggcacacagaccccaaccacgacacccatcaccaccaccactacggtgaccccaaccccaacacccaccggcacacagaccccaaccacgacacccatcaccaccaccactacggtgaccccaaccccaacacccaccggcacacagaccccaaccacgacacccatcaccaccaccactacggtgaccccaaccccaacacccaccggcacacagaccccaaccacgacacccatcaccaccaccactacggtgaccccaaccccaacacccaccggcacacagaccccaaccacgacacccatcaccaccaccactacggtgaccccaaccccaacacccaccggcacacagaccccaaccacgacacccatcaccaccaccactacggtgaccccaaccccaacacccaccggcacacagaccccaaccacgacacccatcaccaccaccactacggtgaccccaaccccaacacccaccggcacacagaccccaaccacgacacccatcaccaccaccactacggtgaccccaaccccaacacccaccggcacacagaccccaaccacgacacccatcaccaccaccactacggtgaccccaaccccaacacccaccggcacacagaccccaaccacgacacccatcaccaccaccactacggtgaccccaaccccaacacccaccggcacacagaccccaaccacgacacccatcaccaccaccactacggtgaccccaaccccaacacccaccggcacacagaccccaaccacgacacccatcaccaccaccactacggtgaccccaaccccaacacccaccggcacacagaccccaaccacgacacccatcaccaccaccactacggtgaccccaaccccaacacccaccggcacacagaccccaaccacgacacccatcaccaccaccactacggtgaccccaaccccaacacccaccggcacacagaccccaaccacgacacccatcaccaccaccactacggtgaccccaaccccaacacccaccggcacacagaccccaaccacgacacccatcaccaccaccactacggtgaccccaaccccaacacccaccggcacacagaccccaaccacgacacccatcaccaccaccactacggtgaccccaaccccaacacccaccggcacacagaccccaaccacgacacccatcaccaccaccactacggtgaccccaaccccaacacccaccggcacacagaccccaaccacgacacccatcaccaccaccactacggtgaccccaaccccaacacccaccggcacacagaccccaaccacgacacccatcaccaccaccactacggtgaccccaaccccaacacccaccggcacacagaccccaaccacgacacccatcaccaccaccactacggtgaccccaaccccaacacccaccggcacacagaccccaaccacgacacccatcaccaccaccactacggtgaccccaaccccaacacccaccggcacacagaccccaaccacgacacccatcaccaccaccactacggtgaccccaaccccaacacccaccggcacacagaccccaaccacgacacccatcaccaccaccactacggtgaccccaaccccaacacccaccggcacacagaccccaaccacgacacccatcaccaccaccactacggtgaccccaaccccaacacccaccggcacacagaccccaaccacgacacccatcaccaccaccactacggtgaccccaaccccaacacccaccggcacacagaccccaaccacgacacccatcaccaccaccactacggtgaccccaaccccaacacccaccggcacacagaccccaaccacgacacccatcaccaccaccactacggtgaccccaaccccaacacccaccggcacacagaccccaaccacgacacccatcaccaccaccactacggtgaccccaaccccaacacccaccggcacacagaccccaaccacgacacccatcaccaccaccactacggtgaccccaaccccaacacccaccggcacacagaccccaaccacgacacccatcaccaccaccactacggtgaccccaaccccaacacccaccggcacacagaccccaaccacgacacccatcaccaccaccactacggtgaccccaaccccaacacccaccggcacacagaccccaaccacgacacccatcaccaccaccactacggtgaccccaaccccaacacccaccggcacacagaccccaaccacgacacccatcaccaccaccactacggtgaccccaaccccaacacccaccggcacacagaccccaaccacgacacccatcaccaccaccactacggtgaccccaaccccaacacccaccggcacacagaccccaaccacgacacccatcaccaccaccactacggtgaccccaaccccaacacccaccggcacacagaccccaaccacgacacccatcaccaccaccactacggtgaccccaaccccaacacccaccggcacacagaccccaaccacgacacccatcaccaccaccactacggtgaccccaaccccaacacccaccggcacacagaccccaaccacgacacccatcaccaccaccactacggtgaccccaaccccaacacccaccggcacacagaccccaaccacgacacccatcaccaccaccactacggtgaccccaaccccaacacccaccggcacacagaccccaaccacgacacccatcaccaccaccactacggtgaccccaaccccaacacccaccggcacacagaccccaaccacgacacccatcaccaccaccactacggtgaccccaaccccaacacccaccggcacacagaccccaaccacgacacccatcaccaccaccactacggtgaccccaaccccaacacccaccggcacacagaccccaaccacgacacccatcaccaccaccactacggtgaccccaaccccaacacccaccggcacacagaccccaaccacgacacccatcaccaccaccactacggtgaccccaaccccaacacccaccggcacacagaccccaaccacgacacccatcaccaccaccactacggtgaccccaaccccaacacccaccggcacacagaccccaaccacgacacccatcaccaccaccactacggtgaccccaaccccaacacccaccggcacacagaccccaaccacgacacccatcaccaccaccactacggtgaccccaaccccaacacccaccggcacacagaccccaaccacgacacccatcaccaccaccactacggtgaccccaaccccaacacccaccggcacacagaccccaaccacgacacccatcaccaccaccactacggtgaccccaaccccaacacccaccggcacacagaccccaaccacgacacccatcaccaccaccactacggtgaccccaaccccaacacccaccggcacacagaccccaaccacgacacccatcaccaccaccactacggtgaccccaaccccaacacccaccggcacacagaccccaaccacgacacccatcaccaccaccactacggtgaccccaaccccaacacccaccggcacacagaccccaaccacgacacccatcaccaccaccactacggtgaccccaaccccaacacccaccggcacacagaccccaaccacgacacccatcaccaccaccactacggtgaccccaaccccaacacccaccggcacacagaccccaaccacgacacccatcaccaccaccactacggtgaccccaaccccaacacccaccggcacacagaccccaaccacgacacccatcaccaccaccactacggtgaccccaaccccaacacccaccggcacacagaccccaaccacgacacccatcaccaccaccactacggtgaccccaaccccaacacccaccggcacacagaccccaaccacgacacccatcaccaccaccactacggtgaccccaaccccaacacccaccggcacacagaccccaaccacgacacccatcaccaccaccactacggtgaccccaaccccaacacccaccggcacacagaccccaaccacgacacccatcaccaccaccactacggtgaccccaaccccaacacccaccggcacacagaccccaaccacgacacccatcaccaccaccactacggtgaccccaaccccaacacccaccggcacacagaccccaaccacgacacccatcaccaccaccactacggtgaccccaaccccaacacccaccggcacacagaccccaaccacgacacccatcaccaccaccactacggtgaccccaaccccaacacccaccggcacacagaccgggccccccacccacacaagcacagcaccgattgctgagttgaccacatccaatcctccgcctgagtcctcaacccctcagacctctcggtccacctcttcccctctcacggagtcaaccacccttctgagtaccctaccacctgccattgagatgaccagcacggccccaccctccacacccacggcacccacgaccacgagcggaggccacacactgtctccaccgcccagcaccaccacgtcccctccaggcacccccactcgcggtaccacgaccgggtcatcttcagcccccacccccagcactgtgcagacgaccaccaccagtgcctggaccccaacgccgaccccactctccacacccagcatcatcaggaccacaggcctgaggccctacccttcctctgtgcttatctgctgtgtcctgaacgacacctactacgcaccaggtgaggaggtgtacaacggcacatacggagacacctgttatttcgtcaactgctcactgagctgtacgttggagttctataactggtcctgcccatccacgccctccccaacacccacgccctccaagtcgacgcccacgccttccaagccatcgtccacgccctccaagccgacgcccggcaccaagccccccgagtgcccagactttgatcctcccagacaggagaacgagacttggtggctgtgcgactgcttcatggccacgtgcaagtacaacaacacggtggagatcgtgaaggtggagtgtgagccgccgcccatgcccacctgctccaacggcctccaacccgtgcgcgtcgaggaccccgacggctgctgctggcactgggagtgcgactgctactgcacgggctggggcgacccgcactatgtcaccttcgacggactctactacagctaccagggcaactgcacctacgtgctggtggaggagatcagcccctccgtggacaacttcggagtttacatcgacaactaccactgcgatcccaacgacaaggtgtcctgtccccgcaccctcatcgtgcgccacgagacccaggaggtgctgatcaagaccgtgcatatgatgcccatgcaggtgcaggtgcaggtgaacaggcaggcggtggcactgccctacaagaagtacgggctggaggtgtaccagtctggcatcaactacgtggtggacatccccgagctgggtgtcctcgtctcctacaatggcctgtccttctccgtcaggctgccctaccaccggtttggcaacaacaccaagggccagtgtggcacctgcaccaacaccacctccgacgactgcattctgcccagcggggagatcgtctccaactgtgaggctgcggctgaccagtggctggtgaacgacccctccaagccacactgcccccacagcagctccacgaccaagcgcccggccgtcactgtgcccgggggcggtaaaacgaccccacacaaggactgcaccccatctcccctctgccagctcatcaaggacagcctgtttgcccagtgccacgcactggtgcccccgcagcactactacgatgcctgcgtgttcgacagctgcttcatgccgggctcgagcctggagtgcgccagtctgcaggcctacgcagccctctgtgcccagcagaacatctgcctcgactggcggaaccacacgcatggggcctgcttggtggagtgcccatctcacagggagtaccaggcctgtggccctgcagaagagcccacgtgcaaatccagctcctcccagcagaacaacacagtcctggtggaaggctgcttctgtcctgagggcaccatgaactacgctcctggctttgatgtctgcgtgaagacctgcggctgtgtgggacctgacaatgtgcccagagagtttggggagcacttcgagttcgactgcaagaactgtgtctgcctggagggtggaagtggcatcatctgccaacccaagaggtgcagccagaagcccgttacccactgcgtggaagacggcacctacctcgccacggaggtcaaccctgccgacacctgctgcaacattaccgtctgcaagtgcaacaccagcctgtgcaaagagaagccctccgtgtgcccgctgggattcgaagtgaagagcaagatggtgcctggaaggtgctgtcccttctactggtgtgagtccaagggggtgtgtgttcacgggaatgctgagtaccagcccggttctccagtttattcctccaagtgccaggactgcgtgtgcacggacaaggtggacaacaacaccctgctcaacgtcatcgcctgcacccacgtgccctgcaacacctcctgcagccctggcttcgaactcatggaggcccccggggagtgctgtaagaagtgtgaacagacgcactgtatcatcaaacggcccgacaaccagcacgtcatcctgaagcccggggacttcaagagcgacccgaagaacaactgcacattcttcagctgcgtgaagatccacaaccagctcatctcgtccgtctccaacatcacctgccccaactttgatgccagcatttgcatcccgggctccatcacattcatgcccaatggatgctgcaagacctgcacccctcgcaatgagaccagggtgccctgctccaccgtccccgtcaccacggaggtttcgtacgccggctgcaccaagaccgtcctcatgaatcattgctccgggtcctgcgggacatttgtcatgtactcggccaaggcccaggccctggaccacagctgctcctgctgcaaagaggagaaaaccagccagcgtgaggtggtcctgagctgccccaatggcggctcgctgacacacacctacacccacatcgagagctgccagtgccaggacaccgtctgcgggctccccaccggcacctcccgccgggcccggcgctcccctaggcatctggggagcgggtgagcggggtgggcacagcccccttcactgccctcgacagctttacctcccccggaccctctgagcctcctaagctcggcttcctctcttcagatatttattgtctgagtctttgttcagtccttgctttccaataataaactcagggggacatgc

SEQ ID NO: 37 - DNA, 3941 bp, Human
accatctactccacagtcagctcatccacaactgccatcacctcacctttcactaccgcagagactggggtgacttccacaccttcatccccatcttctctgagtacagacatcccgaccacatccctaagaactctcaccccattatctttgagcaccagcacttcattgactacaaccacagaccttccctctatacccactgatatcagtagcttaccaaccccaatacacatcatttcatcttctccctccatccaaagtacagaaacctcatcccttgtgggcaccacctctcccaccatgtccactgtgagagcgaccctcagaagtactgagaacaccccaatcagttcctttagcacaagtattgttgttacacctgaaaccccaacaacacaggcccctcctgtactgatgtctgccactgggacccaaacatcccctgtacctactactgtcacctttggaagtatggattcctctacgtccactcttcatactcttactccatcaacagccttgagcaagatcatgtcaacatcacagtttcctattcctagcacacattcctccacccttcaaacaactccttcaatcccctctttgcaaacttcactcacatctacaagtgagttcactacagaatctttcactaggggaagtacgtctacaaatgcaatcttgacttcttttagtaccatcatctggtcctcaacacccactattatcatgtcctcttctccatcttctgccagcataactccagtgttcgctactaccattcattctgttccttcgtcaccatacattttcagtacagaaaatgtgggctccgcttctatcacagcctttcctagtctctcttcctcttcaactaccagcacttctccaaccagctcctctctgaccacagctctcactgaaataacccccttttcttatatttcccttccctccaccacaccctgtccaggaactataacaattaccatagtccctgcctcccccactgatccatgtgttgaaatggatcccagcactgaagctacttctcctcccaccactccattaacagtctttccctttactactgaaatggtcacctgtcctagctccatcagtatgcaaactactcttgctacacatatggacacttcttccatgacgccagaaagtgagtccagcatcatacctaatgcttccagttccactggcactgggactgtacccacaaacacagttttcacaagtactcgactgcccaccagtgagacctggctgagcaacaactctgtgatccccacacctcttcctggcgtctctaccatcccgctcaccatgaaaccaagcagtagcctcccgaccatcctgaggacttcaagcaagtcaacacacccatccccacccaccgccaggacttcagagacatcagtggccactacccagactcctaccacccttacaacgcgcaggacaactcccatcacttcttggatgaccacacagtccacgttgaccaccactgcaggcacctgtgacaatggtggcacctgggaacagggccagtgtgcttgccttccggggttttctggggaccgctgtcagctccagaccagatgccagaacgggggccagtgggatggcctcaagtgccagtgccccagcaccttctatggttccagttgtgagtttgctgtggaacaggtggatctagatgtagtggagaccgaggtgggcatggaagtgtctgtggatcagcagttctcgccggacctcaatgacaacacttcccaggcctacagggatttcaacaagaccttctggaatcagatgcagaagatttttgcagacatgcagggcttcaccttcaagggtgtggagatcctgtccctgaggaatggcagcatcgtggtggactacctggtcctgctggagatgcccttcagcccccagctggagagcgagtatgagcaggtgaagaccacgctgaaggaggggctccagaacgccagccaggatgcgaacagctgccaggactcccagaccctgtgttttaagcctgactccatcaaggtgaacaacaacagcaagacagagctgaccccggaagccatctgccgccgcgccgctcccacgggctatgaagagttctacttccctctggtggaggccacccggctccgctgtgtcaccaaatgcacgtcgggcgtggacaacgccatcgactgtcaccagggccagtgcgttctagagacgagcggtcccgcgtgtcgctgctactccaccgacacgcactggttctctggcccgcgctgcgaggtggccgtccactggagggcgctggtcgggggcctgacggccggcgccgcgctgctggtgctgctgctgctggcgctgggcgtccgggcggtgcgctccggatggtggggcggccagcgccgaggccggtcctgggaccaggacaggaaatggttcgagacctgggatgaggaagtcgtgggcactttttcaaactggggtttcgaggacgacggaacagacaaggatacaaatttccatgtggccttggagaacgtggacaccactatgaaggtgcacatcaagagacccgagatgacctcgtcctcagtgtgagccctgcggggccccttcaccaccccctccgccctgccccggacacaagggtctgcattgcgtccatttcaagaggtggccccaggacgcgggcagcccaggctcctgctgttcttgggcaagatgagactgttcccccaaatcccatccttctccttccaacttggctgaaacccacctggagacgcagttcacgtccaggctcttccactgtggaatcttgggcaagtcagtaacgagcctcagtttcctcacctgcaaaacgggtacagcattcctgtatgatagctcacgccgttgttgtgaaaaccacatagacttggtcaattctcggtcctactctgccctcccgtctcagccctcgtgttgccattgcctctctcggatcctccaatcctcacgtccttcacctggtctctggccctggttcttattttctctcaattccctactgcctgtttcttactttgaacctggaggcagcctgcagccccatcccatctcctgccctctcctgatctaactccctgctgcatctcttgctctcattccttagacgtcctccccttttgaccccgttccttcatccatcctgcaccccagtcccccagccctaaatcctccctcctctcctcacatcctggtccctagcaaggtatagatagcctctgtgtcttaggataccccgggtgctgttccctcggtcaccctgttgcccagttccccgtttctcttgctctcattccttgtatcttctccccttctgagcccgtccattcatcggttctgcccccgactcccccagccctaaataccccagctcctaattcccccctcaccccgttgctcaattccccgtttctcttgctctcattccttgtatcttctccccttctgagcctgtccattcatcggtggttctgcccctactcccccagccctaaataccccagctgctgttcctccccatcacccagccaccggattctccattcacccctttctctcacccctggagccccgtgggtgggggcagggcatgagttccccagtccccaaggaaaggcagccccctcagtctccctcctcctcattcccttccatctccctcccctctgccttttaaacccatcccctccgattcccctcctcccccctctctccctggtgtcaactcgattcctgcggtaactctgagccctgaaatcctcagtctccttggcggggaagattggctttggggacaggaagtcggcacatctccaggtctccatgtgcacaatatagagtttattgtaaaaagc

SEQ ID NO: 38 - DNA, 5992 bp, Human
aaattgctgtgaccgcagcatctctaggaagacgctttattcctgaaggacactgactgtcacttgggaaccaagaagccctctgcagtcatgagctctgacgcagaaatggccatttttggagaagcagctccctacctccggaaaccagagaaggagagaatcgaggctcaaaatcgtccattcgattccaagaaagcctgctttgtagcggataataaggaaatgtatgtgaaaggcatgatccagactagggaaaatgacaaagtcatagtcaagaccctcgatgaccggatgctcactctgaacaatgaccaggtcttccccatgaaccctcccaaatttgacaagatcgaggacatggccatgatgactcacctgcatgaacctgctgttctgtacaacctcaaagagcgctatgcagcctggatgatctacacctactcaggcctcttctgtgtcaccgtcaacccctacaagtggctgccggtgtacaagcccgaggtggtggctgcctacagaggcaaaaagcgccaggaggccccgccccacatcttctccatctctgacaatgcctatcagttcatgctgactgatcgagacaaccagtctatcctcatcaccggagaatccggggctgggaagactgtgaacaccaagcgtgtcatccagtattttgcaacaattgcagttaccggggacaagaagaaggagacacagccaggcaaaatgcagggaaccctagaggatcagatcatccaggccaacccactgctggaggcctttggaaatgccaagactgtgaggaatgacaactcctcaagatttgggaagttcattcggattcattttggagccacaggaaagctggcatcggcagacatcgaaacttatctgttagaaaaatccagagtgacgtttcaattatccagtgagagaagctatcatattttctaccaaattatgtcaaacaagaagccagaactaattgacctgcttctgatctccaccaaccccttcgacttccccttcgtgagccaaggagaggtcacggtagccagtatcgatgacagtgaagaactgctggcgacagataatgccattgacatcctgggcttcagctcagaggagaaagtcgggatctacaaactgacgggagccgtgatgcattatgggaacatgaagttcaagcagaagcagcgtgaggagcaggcggagccagacggcaccgaagtggctgacaaagccggatacctgatgggactgaattctgcagaaatgctgaagggcctgtgctgtccaagggtgaaggttggcaatgaatatgtcactaaagggcaaaatgtccagcaggtgaccaattcggtgggtgctctggccaaagccgtctacgagaagatgttcctgtggatggtcacccgcatcaaccagcagttggacaccaagcagcccaggcagtacttcatcggggtcttggacattgctggctttgagatctttgatttcaacagcctggagcagctgtgcatcaacttcaccaatgagaaactgcaacagtttttcaaccaccacatgttcgtgctggagcaggaagagtacaagaaggaaggcatcgagtgggagttcattgacttcggaatggacctggctgcctgcatcgagctcatcgagaagcctatgggcatcttctccatcctggaagaggagtgcatgttccccaaggcaacagacacctccttcaagaacaagctgtatgaccagcatcttggaaaatccaacaacttccagaagcccaagcctgccaaaggcaaggctgaggctcacttctcgctggtgcactatgccggcaccgtggactacaacatcgccggctggctggacaaaaacaaggaccccctgaatgagactgtggtggggctgtaccagaagtcttcgctgaagcttctctccttccttttttccaactatgctggtgcagagacaggtgactccggaggaagcaagaagggcgggaagaagaagggctcctctttccagaccgtgtcggccgtgttcagggaaaatttaaacaaattgatgactaacttaaggagcacccaccctcactttgtacgatgtctgattcccaatgagaccaagactcctggtgtgatggaccactacttggtcatgcaccagctgcgctgtaacggggtcctcgagggcatccggatttgcaggaagggattccccagccggatcctctatgctgacttcaagcagcggtaccggatcctcaatgccagtgctatccctgaagggcagttcattgacagcaaaaatgcctcagagaagctcctcaactccatcgatgtggaccgggagcagttcaggttcggcaacaccaaggtgtttttcaaagctgggctcctgggacttttggaggagatgagagatgagaagctggtgacgctgatgacaagcacgcaggcggtgtgcagggggtacctgatgcgggtggagttcaagaagatgatggagaggagggactccatcttctgcatccaatacaacatccgctcttttatgaacgtcaagcactggccctggatgaacctgttcttcaaaatcaagcccctgctgaagagtgcagaggccgagaaggagatggccaccatgaaggaagactttgagaggaccaaggaagaactggcccgatctgaggctcgccggaaggagctggaggagaaaatggtctccctcctgcaggagaagaatgacctccaattgcaggtccagtctgaaacagaaaatctgatggacgctgaggaacggtgtgaaggactcatcaaaagcaagatcctactggaagcaaaagtcaaggagctgacggagagattggaagaggaagaggagatgaattctgaattggttgccaagaagaggaatctggaagataaatgctcctctctcaagagagacattgatgatctggagctgaccttgacgaaagttgaaaaggagaagcatgccacagagaacaaggtaaagaatctttccgaagaaatgacagcacttgaagaaaacatttccaaattgaccaaagaaaagaaatctctacaggaggcccatcagcaaacactggatgatcttcaggtggaagaagataaagtcaatggtctaatcaaaataaatgccaagcttgaacagcaaacagatgatcttgagggttccttagagcaggagaagaaactgcgggcggacttggaaagggcgaagaggaagctggaaggagatctgaaaatgtcccaggaatccattatggatctagaaaatgaaaagcagcaaatagaagagaaattgaaaaagaaggagtttgaactcagtcagttacaagccagaatagatgacgaacaagtccacagtttgcagtttcaaaagaagattaaagagctgcaagcccgcatagaagagctggaggaggaaattgaagcggaacacacgctcagagccaagattgagaagcagcgctcagatctggccagggaactggaggagatcagcgagaggctggaagaagccagtggggccacttcagcccagattgagatgaacaagaagagggaggctgagttccagaaaatgcgcagggacctggaggaggccaccctgcagcacgaagccacagcagccaccctgaggaagaagcaagcagatagtgtggccgagcttggggagcagattgacaacctgcagcgggtgaagcagaagctggagaaggagaagagcgagctgaagatggagatcgacgacatggccagcaacatcgaggctctctccaagtcaaagagtaacatagaaagaacgtgccggacggtagaagatcaatttagtgaaatcaaagccaaggacgagcaacagacacagttgatccatgatctgaacatgcagaaagcaagactgcagacccaaaatggggagctgagccaccgagtggaagagaaggagtctctgatttcacagctgaccaaaagcaagcaggccctcacccagcagctggaggagcttaagaggcaaatggaagaagaaaccaaggccaagaacgccatggcgcacgccctgcagtcctcccgccacgactgtgacctgctgcgggaacagtatgaggaggagcaggaagccaaggccgagctgcagagggcgctgtccaaggccaacagtgaggttgcccagtggaagaccaaatacgagacggacgccattcagcgcacagaagagctggaggaggccaagaaaaaactggcccagaggctccaggaagcagaggagaagacggagacggcgaactccaagtgcgcatcgttggagaaaaccaagcagaggctgcagggagaggtggaggatctgatgcgggatctggagcgctcccacaccgcctgtgccacactggacaagaagcagaggaacttcgacaaggtccttgcagagtggaagcaaaagctggacgaaagccaggctgagctggaagctgctcagaaggagtccaggtcactcagcactgaactcttcaagatgaggaatgcctatgaggaggtggtggaccagttagagacactgaggcgagagaacaaaaatctgcaagaagagatttccgacttaactgagcagattgcagaaactggcaagaatcttcaggaagcggaaaagaccaagaagctagtggagcaggaaaagtcagatctgcaggtcgccttagaagaagtggagggttccttggaacacgaggagagcaagatcttgcgcgtgcagctagagctgagccaggtgaaatccgagctagaccgcaaggtcattgagaaggatgaagaaatcgagcagctaaaaagaaacagccagcgggcagcagaggccctgcagagcgtgctggatgctgaaatccgcagccggaacgacgccctgaggctaaagaagaagatggagggagaccttaatgagatggagattcagctgggccactccaaccgccagatggcagagacccagaggcatctgcgcacggtccagggccagctcaaggactcccagctgcatctcgatgacgccctgaggagcaatgaggacctcaaggagcagctggccatcgtggagcgcaggaatggcctcctgctggaggagctggaggaaatgaaggtggccctggaacagacggagcggacccgcaggctgtcagagcaggagctgctggacgccagcgaccgcgtgcagctcctgcactcccagaacacaagcctgataaataccaagaaaaaactggaggctgacatagctcagtgccaggcagaggtggagaactcgatccaggagtccaggaacgcagaggagaaggccaagaaggccatcacggatgctgccatgatggctgaggagctaaagaaggaacaggacaccagcgcccacctggagcggatgaagaagaacctggagcagacggtgaaggacctgcagcaccgtctagatgaggctgaacaactggcgctgaagggcgggaagaagcagatccagaaactggagaaccgggtgcgggagctggaaaatgagcttgatgtggaacagaagaggggagctgaagccctgaagggagcccacaagtacgaacgcaaagtcaaggagatgacttaccaggctgaggaggaccgcaagaatatccttaggctccaggacctggtggacaagctgcaggccaaagtgaagtcttacaagaggcaggctgaggaggcggaggagcaggccaacacgcagctgtccagatgccggagagtccagcatgagctagaggaggccgcggagagggcggacatcgctgagtcccaggtcaacaagctgagggccaagagccgagacgtgggcagccagaagatggaagaatgaggctcacctgatgctcgttgccatgggacacctccgagagagtggagggaaaatgtgtgagaaataaattctcctaaatactcgg

SEQ ID NO: 39 - DNA, 661 bp, Human
ggagtggcagccggagtctgaactgtcctgggggaccaagcaggagcttaagatgggcaagacctggggccctgggcagacgcatcaaagcaggcagaagcaggcatggccagcaggaagaccaagaagaaggaagggggtgccctccgggcccagagagcctcatccaatgtcttctccaactttgagcagactcagatccaggagttcaaggaggcattcacactcatggatcagaaccgagatggcttcattgacaaggaggacctgaaggacacctatgcctccctgggcaagaccaacgtcaaggacgacgagctggacgccatgctcaaagaggcctcggggcccatcaacttcaccatgtttctgaacctgtttggggagaagctgagcggtaccgacgccgaggagaccattcttaacgccttcaagatgctggacccggacgggaaagggaaaatcaacaaggagtacatcaagcgtctgctgatgtcccaggctgacaagatgacggcggaagaggtggaccagatgttccagttcgcctccatcgatgtggcgggcaacctggactacaaggcgctcagctacgtgatcacccacggggaggagaaggaggagtgagacccagccgggtcaataaacctggacgcttgga

SEQ ID NO: 40 - DNA, 5749 bp, Human
cgcgggagccaacttcaggctgctcagaggaagcccgtgcagtcagtcacctgggtgcaagagcgttgctgcctcgggctctcccgctgcagggagagcggcactcgctggcctggatgtggttggatttaggggggctccgcagcaggggtttcgtggcggtggcaagcgctgcaacaggtagacggcgagagacggaccccggccgaggcagggatggagaccaaaggctaccacagtctccctgaaggtctagatatggaaagacggtggggtcaagtttctcaggctgtggagcgttcttccctgggacctacagagaggaccgatgagaataactacatggagattgtcaacgtaagctgtgtttccggtgctattccaaacaacagtactcaaggaagcagcaaagaaaaacaagaactactcccttgccttcagcaagacaataatcggcctgggattttaacatctgatattaaaactgagctggaatctaaggaactttcagcaactgtagctgagtccatgggtttatatatggattctgtaagagatgctgactattcctatgagcagcagaaccaacaaggaagcatgagtccagctaagatttatcagaatgttgaacagctggtgaaattttacaaaggaaatggccatcgtccttccactctaagttgtgtgaacacgcccttgagatcatttatgtctgactctgggagctccgtgaatggtggcgtcatgcgcgccattgttaaaagccctatcatgtgtcatgagaaaagcccgtctgtttgcagccctctgaacatgacatcttcggtttgcagccctgctggaatcaactctgtgtcctccaccacagccagctttggcagttttccagtgcacagcccaatcacccagggaactcctctgacatgctcccctaatgctgaaaatcgaggctccaggtcgcacagccctgcacatgctagcaatgtgggctctcctctctcaagtccgttaagtagcatgaaatcctcaatttccagccctccaagtcactgcagtgtaaaatctccagtctccagtcccaataatgtcactctgagatcctctgtgtctagccctgcaaatattaacaactcaaggtgctctgtttccagcccttcgaacactaataacagatccacgctttccagtccggcagccagtactgtgggatctatctgtagccctgtaaacaatgccttcagctacactgcttctggcacctctgctggatccagtacattgcgggatgtggttcccagtccagacacgcaggagaaaggtgctcaagaggtcccttttcctaagactgaggaagtagagagtgccatctcaaatggtgtgactggccagcttaatattgtccagtacataaaaccagaaccagatggagcttttagcagctcatgtctaggaggaaatagcaaaataaattcggattcttcattctcagtaccaataaagcaagaatcaaccaagcattcatgttcaggcacctcttttaaagggaatccaacagtaaacccgtttccatttatggatggctcgtatttttcctttatggatgataaagactattattccctatcaggaattttaggaccacctgtgcccggctttgatggtaactgtgaaggcagcggattcccagtgggtattaaacaagaaccagatgacgggagctattacccagaggccagcatcccttcctctgctattgttggggtgaattcaggtggacagtccttccactacaggattggtgctcaaggtacaatatctttatcacgatcggctagagaccaatctttccaacacctgagttcctttcctcctgtcaatactttagtggagtcatggaaatcacacggcgacctgtcgtctagaagaagtgatgggtatccggtcttagaatacattccagaaaatgtatcaagctctactttacgaagtgtttctactggatcttcaagaccttcaaaaatatgtttggtgtgtggggatgaggcttcaggatgccattatggggtagtcacctgtggcagctgcaaagttttcttcaaaagagcagtggaagggcaacacaactatttatgtgctggaagaaatgattgcatcattgataagattcgacgaaagaattgtcctgcttgcagacttcagaaatgtcttcaagctggaatgaatttaggagcacgaaagtcaaagaagttgggaaagttaaaagggattcacgaggagcagccacagcagcagcagcccccacccccacccccacccccgcaaagcccagaggaagggacaacgtacatcgctcctgcaaaagaaccctcggtcaacacagcactggttcctcagctctccacaatctcacgagcgctcacaccttcccccgttatggtccttgaaaacattgaacctgaaattgtatatgcaggctatgacagctcaaaaccagatacagccgaaaatctgctctccacgctcaaccgcttagcaggcaaacagatgatccaagtcgtgaagtgggcaaaggtacttccaggatttaaaaacttgcctcttgaggaccaaattaccctaatccagtattcttggatgtgtctatcatcatttgccttgagctggagatcgtacaaacatacgaacagccaatttctctattttgcaccagacctagtctttaatgaagagaagatgcatcagtctgccatgtatgaactatgccaggggatgcaccaaatcagccttcagttcgttcgactgcagctcacctttgaagaatacaccatcatgaaagttttgctgctactaagcacaattccaaaggatggcctcaaaagccaggctgcatttgaagaaatgaggacaaattacatcaaagaactgaggaagatggtaactaagtgtcccaacaattctgggcagagctggcagaggttctaccaactgaccaagctgctggactccatgcatgacctggtgagcgacctgctggaattctgcttctacaccttccgagagtcccatgcgctgaaggtagagttccccgcaatgctggtggagatcatcagcgaccagctgcccaaggtggagtcggggaacgccaagccgctctacttccaccggaagtgactgcccgctgcccagaagaactttgccttaagtttccctgtgttgttccacacccagaaggacccaagaaaacctgtttttaacatgtgatggttgattcacacttgttcaacagtttctcaagtttaaagtcatgtcagaggtttggagccgggaaagctgtttttccgtggatttggcgagaccagagcagtctgaaggattccccacctccaatcccccagcgcttagaaacatgttcctgttcctcgggatgaaaagccatatctagtcaataactctgattttgatattttcacagatggaagaagttttaactatgccgtgtagtttctggtatcgttcgcttgttttaaaagggttcaaggactaacgaacgttttaaagcttacccttggtttgcacataaaacgtatagtcaatatggggcattaatattcttttgttattaaaaaaacacaaaaaaataataaaaaaatatatacagattcctgttgtgtaataacagaactcgtggcgtggggcagcagctgcctctgagccctcgctcgtccacggtcttctgcatcactggtatacacactcgttagcgtccatttcttatttaattagaatggataagatgatgttaaatgccttggtttgatttctagtatctattgtgttggctttacaaataattttttgcagtcttttgctgtgctgtacattactgtatgtataaattatgaaggacctgaaataaggtataaggatcttttgtaaatgagacacatacaaaaaaaatctttaatggttaataggatgaatgggaaagtatttttgaaagaattctattttgctggagactatttaagtactatctttgtctaaacaaggtaatttttttttgtaaagtgcaatgtcctgcatgcataatgaaccgtttacagtgtatttaagaaagggaaagctgtgccttttttagcttcatatctaatttaccattattttacagtctctgttgtaaataaccacactgaaacctcttcggttgtcttgaaacctttctactttttctgtactttttgttttgttcttggtctcccgcttggggcatttgtgggactccagcacgttttctggcttctgcttcatcctgctccatcggggaatgacacactgcggtgtctgcagctcctggaaggtgtcatttgacaacacatgtgggagaggaggtccttggagtgctgcagctttgggaaagcctgcctcgtttcccttttcctctagaagcagaaccagctctacgagagtgagactgggaacttgatggctcagagagcatcttttcctcccattttagaaaatcagattttctcctgtgggaaaaaaaaattccatgcactctctctctgttaaagatcagctattcccttctgatcttggaaagaggttctgcactcctggaaccggtcacaggaacgcacagatcatggcaggatgcgctgggacggcccatcttggcaaggttcagtctgaatggcatggagaccgggagatagaggggttttagatttttaaaaggtaggttttaaaaataagttttatacataaacagttttggagaaaaattacagatcatataagcaagacagtggcactaaaatgtttaattcattaatctgtttgtttggcactgatgcaatgtatggcttttctcttgccccaaatcacaaacatatgtatctttggggaaactaacaatatgattgcactaaataaactactttgaatagaggccaaattaatcttttaaaaatgatgataatcatcaggtttactcagtgaaatcatattaattattttccaaaatctaaaagctgtagctggagaagcccatggccacgaggaagcagcaattaattagatcaacacttttctccagggttcaccatgcaggcaacattaccttgtctttcaaaagacacctgccttagtgcaaggggaaacctgtgaaagctgcactcagagggaggagtctttcttacataatttgcaatttcaggaatttaatttataggcagatctttaaatacagtcaacttacggtgcacagtaatatgaaagccacactttgaaggtaataaatacacagcatgcagactgggagttgctagcaaacaaatggcttacttacaaaagcagcttttagttcagacttagtttttataaaatgagaattctgacttacttaaccaggtttgggatggagatggtctgcatcagctttttgtattaacaaagttactggctctttgtgtgtctccaggtaactttgcttgattaaacagcaaagccatattctaaattcactgttgaatgcctgtcccagtccaaattgtctgtctgctcttatttttgtaccatattgctcttaaaaatcttggtttggtacagttcataattcaccaaaaagttcatataatttaaagaaacactaaattagtttaaaatgaagcaatttatatctttatgcaaaaacatatgtctgtctttgcaaaggactgtaagcagattacaataaatcctttacttt

SEQ ID NO: 41 - DNA, 2306 bp, Human
tcatcatccaagtttgtagttcatttaaaaatacaacattaaacacattttgctaggatgtcaaatagtcacagttctaagtagttggaaacaaaattgacgcatgttaatctatgcaaagagaaaggaaaggatgaggtgatgtattgactcaaggttcattcttgctgcaattgaacatcctcaagagttgggatggaaatggtgatttttacatgtgtcctggaaagatattaaagtaattcaaatcttccccaaaggggaaaggaagagagtgatactgacctttttaagtcatagaccaaagtctgctgtagaacaaatatgggaggacaaagaatcgcaaattcttcaaatgactattatcagtattattaacatgcgatgccacaggtatgaaagtcttgccttatttcacaattttaaaaggtagctgtgcagatgtggatcaacatttgtttaaaataaagtattaatactttaaagtcaaataagatatagtgtttacattctttaggtcctgaggggcagggggatctgtgatataacaaaatagcaaaagcggtaatttccttaatgttatttttctgattggtaattatttttaacagtacttaattattctatgtcgtgagacactaaaatcaaaaacgggaatctcatttagactttaatttttttgagattatcggcggcacaatcactttgtagaaactgtaaaaaataaaagtatctcctagtcccttaattttttcataaatatttctggcttttgagtagtgtatttatattgtatatcatactttcaactgtagacaattatgatgctaatttattgtttcttggtttcacctttgtataagatatagccaagactgaagaaaccaaatatatgtgtttactgtagcatgtcttcaaattagtggaacttagttcagggacatagaagagtcttaatgaattaaaatcattcacttgattaaatgtctgtaaatcttcatcattcctactgtagtttatttaatatctattgtaaattatgtgacttgtagcttcctctggttttcaagtaaactcaacaaggtggagtcttacctggttttcctttccaagcattgtaaattgtataccaaagatattagttattacttctgtgtgtacaaagaggattattttattatgtttattaatcacctctaatactcatccacatgaagggtacacattaggtaagctgggcgttgactcatgcgcagtctcagtcacccgtgttatcttcgtggctcaaaggacaatgcaaaatcgccgatcagagctcatacccaaagcattacagagaacagcagcatcattgccctccccagctgaaaaacaagttggctagaagatacatggagaggaatggtgtggtcaacagttaatgaaacggttctatcatgcatgtgtaatgtggatggagacaattataagatttgactataactatttggagggtctttaacattgccaaaaaaacaaatatgttgatttttattttattttattttttattttaagaggcgggatcttgatctcacatgttgcccaggctggccttgaactcctgggctcaagcattcctcctgcctcagcctcccccatagctgggactaggggtgcatgccagcatacctggctacgttgactcttaaaatctatgttctcttattttaaagatacagtgctccccactgaaaattaaacctaaaaaatgtcacatattggtatgttgttaacctggtagattaaatcatgagaatgattagaaagacgggcaacacagcgggttacatccacactgctgatcacaccaacgacaggagctgataagcaagaaagcgtcacagccagcgtctgttcacccaaggttgacaagtgaagtttctctaatgttgattgttagccgatttgtaacctggcatttacttagcaactgccttatcaattacaggatttgccggtaaaagcagactcaaatataaaggtttttggcttaacttggtttattatagttgctctatgtttgtaaacagacaatctctaatgtctgattatttgtatcacagatctgcagctgccttggacttgaatccatgcaatgtttagagtgtgaagtcagttacttgttgatgttttcttactgtatcaatgaaatacatattgtcatgtcagttcttgccaggaacttctcaacaaaatggaattttttttttcagtatttcaataaatattgatatgcccagcctgataaaaaaaaaaaaaaaaaa

SEQ ID NO: 42 - DNA, 7609 bp, Human
atctaccaccttaaaaccctgatctagaaaaaatatatattcatgataggaagttataactaagaaaatttatttgcctcttaatgctcctgaatgaaagaaattatccctttgttctttgggaggacttgtgtatctgagattgttgtaataatcagtcattttattaaaaccttgacatgatcaccagggaggaaaaatagagcaatagtcaaaacctgtgtgttagtccaagatgacttctgaagaaatgacagcttctgttctcatacctgtgactcagagaaaagtggtttctgcccagtcggctgcagatgaaagtagtgaaaaggtctcagacatcaatatttcaaaagcacatactgtcagacgaagtggggagacttctcataccatctcacaactgaacaaacttaaagaagaaccttctggaagcaacttgccaaagattctctcaatagcgagggagaaaatagtgagtgatgagaacagtaatgaaaaatgttgggagaaaatcatgccagattctgcgaaaaaccttaacattaactgcaacaacatattgagaaaccatcagcatggccttcctcagagacaattttatgaaatgtacaactctgttgctgaggaagacttgtgtttagaaactggaattccttctccactggaaagaaaggtgttccctggaattcaactggaactagacagaccttccatgggcattagtcctttaggaaatcagtcagtgatcatagagacaggcagagcacaccctgacagcagaagggcagtatttcattttcattatgaagttgacagaagaatgtcagacactttctgtaccctatcagaaaacttaattttagacgattgtggaaattgtgtaccactacctgggggtgaggagaagcaaaagaaaaactatgtggcatatacctgtaaactgatggaattggccaaaaattgtgataataagaatgagcagctgcagtgtgatcattgtgacaccttgaatgataaatacttttgctttgaaggctcttgtgagaaggttgacatggtatattcaggtgatagcttttgtaggaaagactttactgacagtcaagctgccaagacctttttgagccattttgaggacttccctgataattgtgatgatgtagaagaagacgcttttaaaagcaaaaaggagcgatccactttgttagtcaggagattctgtaaaaatgacagagaagttaagaaatctgtgtatactggaacaagagcaattgtgagaactctgccttctggccacattgggctgactgcatggagttacatagatcagaagagaaatggtcccttactgccttgtgggagagtaatggaacccccgtcaacagtggagataaggcaagatgggagccaacgtctgtcagaagcccagtggtatcctatctacaatgcagtgagaagagaagaaacagaaaatacagttggatctctactccatttcctcaccaagctcccagcctccgagacagcccatggaaggataagcgttggtccatgcttaaagcaatgtgtccgagacactgtatgtgagtatcgcgccaccctccaaaggacttcaatatcgcagtacatcaccggttctctcctagaagcaaccacgtctttgggagcaagaagtggccttctcagtacttttggaggatccactggacgaatgatgctgaaagaacgccagccaggcccctctgtggccaattccaatgccctcccttcaagttcagctgggatcagcaaggagctgatcgatctgcagcctctcatccagttcccagaggaagtcgccagcatcctgatggagcaagagcagactatttaccgcagggtcttgccagtcgactacctttgcttcttaacacgggacttgggcactcctgaatgccagagctccttgccctgcctcaaagcatccatctcagcgtcgattcttaccactcagaatggagagcacaatgcccttgaagatctggtgatgaggtttaatgaggtgagctcctgggtgacatggctgatcctcacggcaggctccatggaggagaagcgagaagtcttttcatatttggtgcatgtggccaaatgctgctggaacatgggcaactacaacgctgtcatggagttcttggctggcctcaggtcaagaaaagttttaaaaatgtggcagttcatggaccagtctgatattgagaccatgaggagcctgaaggatgctatggcccagcatgagtcctcttgtgagtacagaaaggtggtgacacgtgccctgcacatccctggctgtaaggtggttccattctgtggggtgtttctgaaggagctctgtgaagtgcttgacggcgcctccggtctcatgaagctttgcccgcggtacaattcccaagaagaaactttagagtttgtagcagattacagtggacaagataatttcttacaacgagtgggacaaaatggcttaaagaattcggagaaggagtccactgtcaacagcatctttcaggtcatccggagctgcaatcgaagtctggagacagacgaggaggacagccccagtgaagggaacagctccaggaaaagctccttgaaggataaaagccgatggcagtttataattggagatttgttggattcagacaatgacatctttgagcaatccaaagaatacgactctcatggttcagaggactcacagaaggccttcgaccatgggacggagctcatcccttggtacgtgctgtccatccaagccgatgtgcaccagttcctgctgcagggggccacggtcatccactacgaccaggacacacacctctctgcccgctgcttcctccagcttcagcccgacaatagcaccttgacctgggtaaagcccacaactgcctccccagccagcagtaaagcaaaacttggtgtacttaataacacagctgagcctggaaaattcccactactgggtaatgctggattaagtagcctgacggaaggggtcttggatctttttgcagtgaaggctgtatacatgggccaccctggcattgatatacacactgtgtgtgttcagaacaaactgggtagcatgttcctgtcagagactggtgtgacattgctctatgggcttcagaccacagacaacagattattgcacttcgtggcaccaaagcacacagctaaaatgctcttcagcggattattggaactcactagagctgtgagaaagatgaggaaattccctgaccaaagacagcagtggctgcggaaacagtacgtcagcctttatcaggaggatggacggtatgaaggcccaactttggctcacgctgtggagttgtttggtggcagacggtggagtgctcgaaaccccagccccggaacatcagcaaagaatgctgagaagcccaatatgcagagaaacaataccctgggcataagcactaccaagaaaaagaagaaaatcctcatgaggggtgagagtggagaggtaactgacgatgagatggcaacccgaaaggccaagatgcacaaagagtgtcgaagccggagtggttctgatcctcaagacattaatgaacaagaagaatcagaggtgaatgccatcgctaaccctccaaaccccctcccttccagaagagcccactctttgaccacagctgggtcccccaacttggctgccgggacgtcatctcccatcaggccagtgtcctcccctgtgctgtcttcttcaaacaagagcccatccagtgcttggagcagtagtagctggcacgggcggatcaaaggcggcatgaagggatttcagagcttcatggtttcagatagcaacatgagttttgttgaatttgttgagctgttcaaatcattcagtgtcaggagccgcaaggacctgaaggatctgtttgatgtctatgcagtgccctgcaaccgatctggctccgagtcagccccactctacaccaacctgacaattgatgaaaacaccagcgatcttcagcctgacctagatctgttgaccagaaatgtctcggatttggggttgttcattaagagtaaacagcagctatcggacaaccagaggcagatatctgatgccattgctgctgcaagcattgtgacaaatggcactgggattgagagcacatctctgggcatttttggggtgggcatacttcagctcaacgatttcctcgtgaattgccaaggagaacactgcacttatgatgaaatcctcagcatcatccagaagttcgagcctagcatcagtatgtgtcatcagggactaatgtcatttgaagggtttgccaggtttctgatggataaagaaaattttgcctcaaaaaatgatgagtcacaggagaacattaaagaactgcagctacccctctcatactattacatcgaatcttcgcacaatacctacctcacgggccatcagctcaaaggagaatcctcggtagaactctacagccaggtccttttgcaaggctgtcgaagtgtagaattggactgctgggacggagacgatgggatgcccatcatttatcatggacatacgccgacaaccaagatccccttcaaggaagtggttgaagccattgatcgcagtgccttcatcaactctgacctgccaatcatcatatcgattgagaaccactgttcattgcctcagcaacgaaaaatggcagaaattttcaagactgtgtttggagaaaagctggtgactaaattcttatttgagactgatttctcagatgatccaatgcttccttcacctgaccaactcagaaagaaagttcttcttaaaaacaagaagctaaaagcccatcagacgccagtggatatcttaaagcaaaaggctcatcagttagcatctatgcaagtgcaggcttataatggtgggaatgccaacccccgacctgccaataatgaggaagaggaagatgaggaggacgaatatgattatgactatgaatccctttctgatgacaacattctggaagacagacctgaaaataaatcatgtaatgacaagcttcagtttgaatataatgaagaaatcccaaagaggataaagaaagcagataactctgcttgcaacaaaggaaaggtttatgatatggaactgggagaagaattttatcttgatcagaataaaaaggaaagcagacagattgcaccagagctttctgaccttgtaatctatcgtcaagcagtaaaatttccaggactgtcaactctaaatgcatctggctctagcagaggaaaagaaaggaaaagcaggaagtccatttttggcaacaatccgggcagaatgagcccaggggagacagcatcatttaacaaaacatctggaaaaagttcctgtgaaggcattcgacagacctgggaggaatcttcttcccccctcaacccaaccacgtccctcagtgctatcattagaactcccaaatgttatcatatctcgtcgctgaatgaaaatgccgccaaacgtctgtgtcgcaggtattctcagaaactgatccagcacaccgcctgtcagctgctgagaacttaccctgctgccacccgcatcgactcttccaacccgaaccccctcatgttctggctccatgggatacagcttgtggcactcaactaccagactgatgatctccctttacatttaaatgctgcaatgtttgaggcaaatggtggttgtggttatgtattgaaacctccagttctgtgggacaagaactgccccatgtatcagaagttttctccactagaaagagatctggacagcatggatcctgcagtctattctttaactattgtctctggtcagaatgtgtgccccagtaatagcatgggaagcccgtgcattgaagtcgacgtcctgggcatgcctctggacagctgccatttccgcacaaagcccatccatcgaaacaccctgaaccccatgtggaacgagcagtttctgttccgcgttcacttcgaagatcttgtatttcttcgttttgcagttgtggaaaacaatagttcagcggtaactgctcagagaatcattccactgaaagctttaaaacgaggatatcgacatcttcagctgcgaaaccttcacaatgaagtcttggagatttctagtttattcattaacagcagaaggatggaagaaaattcctctggcaataccatgtcagcctcttcgatgtttaatacagaagaaagaaaatgtttgcagactcacagagtcacggtgcatggggtcccagggccagagccctttaccgttttcactattaatggaggcaccaaggcaaagcagcttctgcagcaaattctgacaaatgaacaagacatcaaacctgttaccacagactattttttgatggaagaaaaatattttatatctaaagaaaagaatgaatgtaggaaacaaccattccagagagccattggtccagaagaggagatcatgcaaattttaagcagctggtttccagaagagggatacatgggcaggattgtcttaaaaacccagcaggaaaacctagaagagaaaaacattgttcaagatgacaaagaggtgatcttgagctcagaggaggagagtttctttgtccaagtgcatgatgtttctccagagcaacctcgaacagtcatcaaagcaccccgcgtcagcactgcacaggatgtcattcagcagaccttatgcaaagccaaatattcctacagcatcctgagcaaccccaatccaagcgactatgtgcttttggaagaggtggtgaaagacactaccaacaagaagactaccacaccaaagtcctctcagcgggtccttctggatcaggagtgtgtgtttcaagcccaaagcaagtggaaaggtgcaggaaaattcatccttaagctaaaggagcaggtgcaggcatctcgagaagataaaaagaaaggcatttctttcgcaagtgaactcaagaagctcaccaagtcaactaaacagccccgaggacttacatcaccttctcagctcttgacctcagaaagtatccaaaccaaggaggagaaacctgtgggtggcttgtctccagtgacacaatggattaccgacagtgactaagggcagcatgtttaacccaggtggagatctttaagcaagaagttaaagagtgaacatggtggaaaaaatataattattttcatcagacttaaactggaaattgatgatttctgaactgaagccttcacacatgtgagatccatgctgaggagaagcaaaatggcacagggctagttgccaccaaccaatttactgatgaatgaagcccaggggactgccattttataaatgtcagcagttggaaaaatcgtcacgaattgacttagagcaagggtcagcaagcttgtctgtaaagggccaaacagtaaatattttagggctgggggccataaaatatgttgcaaccacccaattctgccattgtagtgcaaaagcagccatagacaacacatacatgaacgaacgtggctgtattccaataaaactttatttatggacactgaaaaaaaaaaaaaaaaaaaa

SEQ ID NO: 43 - DNA, 1922 bp, Human
gcacgagaatgtccctgagacccagaagggcctgcgctcagctgctctggcaccccgctgcagggatggcctcctgggctaagggcaggagctacctggcgcctggtttgctgcagggccaagtggccatcgtcaccggcggggccacgggcatcggaaaagccatcgtgaaggagctcctggagctggggagtaatgtggtcattgcatcccgtaagttggagagattgaagtctgcggcagatgaactgcaggccaacctacctcccacaaagcaggcacgagtcattcccatacaatgcaacatccggaatgaggaggaggtgaataatttggtcaaatctaccttagatacttttggtaagatcaatttcttggtgaacaatggaggaggccagtttctttcccctgctgaacacatcagttctaagggatggcacgctgtgcttgagaccaacctgacgggtaccttctacatgtgcaaagcagtttacagctcctggatgaaagagcatggaggatctatcgtcaatatcattgtccctactaaagctggatttccattagctgtgcattctggagctgcaagagcaggtgtttacaacctcaccaaatctttagctttggaatgggcctgcagtggaatacggatcaattgtgttgcccctggagttatttattcccagactgctgtggagaactatggttcctggggacaaagcttctttgaagggtcttttcagaaaatccccgctaaacgaattggtgttcctgaggaggtctcctctgtggtctgcttcctactgtctcctgcagcttccttcatcactggacagtcagtggatgtggatgggggccggagtctctatactcactcgtatgaggtaccagatcatgacaactggcccaagggagcaggggacctttctgttgtcaaaaagatgaaggagacctttaaggagaaagctaagctctgagctgaggaaacaaggtgtcctccatcccccagtgccttcacatcttgaggatatgcttctgtactttttaaaagcttatagttggtatggaaaacatttttcttatttttaagtgttattaattatatctatggaaaaactattcctgaaatatatacagtcttatgtcccaatcagagtcttttaacctatgatttaaaaatgtataagtaacagaaattaacatattttaatgactttactttttatttctaagaaaagtatttgaaaaatggaataattttaaatcaatgataattctagggatcatgaactcccagaagattttattatttaattgtaaaggtagaggccggacgcagtggctcacgcctgtaattccagcactttgggaggccgaggtgggcgggtcagttgaggtcaggagttcaagaccaggctggccaacatggtaaaaccctgtctctactgaaaaacaacaaaaacaaaaacacaaattagtcgggtgtggtggcacacacctgtagtcccaggtacttgggaggctgaggcaggaggatcgcttgaacccaggaagcagaggttgcagtgagctgagatcgtgctactgcagtccagcctgggctacagagtgagactgcatctcaaaaaaaacccmaaaaaacaaaaacaaacaacaacaacaaaattataaaggtagaaaataaatctaaattgtgtcgtaattaagattattaaaatgagaattatacaatgacttatttttggtggcaaatactttaggagcaataatgccttatggtaattattgatgtatagttttttttgtttatgaagtcaaatttgtataaatttttttaattcaaaggaaaagttttatgtgattttaaaaaaaaaaaaaaaaaaaaaaaaaaaaaaaaaaaaaaaaaaaaaaaaaaaaaaaaa

SEQ ID NO: 44 - DNA, 1182 bp, Human
aggacaccaggcacagagatccaaactattatatcaaatccaatccctaaaatggaagaagccaaaagccaaagtttggaggaagactttgaaggacaggccacacatacaggacccaaaggagtaataaatgattggagaaagtttaaattagagagtcaagacagtgattcaattccacctagcaagaaggagattctcaggcaaatgtcttctcctcagagtaggaatggcaaagattcaaaggaacgagtcagcagaaagatgagcattcaagaatatgaactaatccataaagagaaagaggatgaaaactgccttcgtaaataccgtagacagtgtatgcaggatatgcaccagaagctgagttttgggcctagatatgggtttgtgtatgagctggaaactggaaagcaattcctagaaacaattgaaaaggaactgaagatcaccacaattgttgttcacatttatgaagatggtattaagggttgtgatgctctaaacagtagtttaacatgccttgcagcagaataccctatagttaagttttgtaaaataaaagcttcgaatacaggtgctggggaccgcttttccttagatgtacttcctacactgctcatctataaaggtggggaactcataagcaattttattagtgttgctgaacagtttgctgaagaattttttgctggggatgtggagtctttcctaaatgaatatgggttactacctgaaagagaggtacatgtcctagagcataccaaaatagaagaagaagatgttgaatgaagattcactatgtcaatatctcatgtttatcctttaggtattggatgatggttttggtagtatctatattgcttttgtgaacacagagtatgggcacggctatgctaacttgacaaaaatgactgatgcaacaatcgagttattagcatttcatagtattagttactcaaattgatacaatgcttgactacaaaacaaagctgtcttcagcaacattattagtagacaaagaggatgtggataatattatgacatttttcaaaaatccctttcaagttatgttttgtcttttttactccattttccctcatcactgttattatttggacttttcaaattacattattcattataattttctttgtgtaataaaaatgaaatctcatgaag

SEQ ID NO: 45 - DNA, 3160 bp, Human
cctcccctcgcccggcgcggtcccgtccgcctctcgctcgcctcccgcctcccctcggtcttccgaggcgcccgggctcccggcgcggcggcggagggggcgggcaggccggcgggcggtgatgtggcaggactctttatgcgctgcggcaggatacgcgctcggcgctgggacgcgactgcgctcagttctctcctctcggaagctgcagccatgatggaagtttgagagttgagccgctgtgaggcgaggccgggctcaggcgagggagatgagagacggcggcggccgcggcccggagcccctctcagcgcctgtgagcagccgcgggggcagcgccctcggggagccggccggcctgcggcggcggcagcggcggcgtttctcgcctcctcttcgtcttttctaaccgtgcagcctcttcctcggcttctcctgaaagggaaggtggaagccgtgggctcgggcgggagccggctgaggcgcggcggcggcggcggcggcacctcccgctcctggagcgggggggagaagcggcggcggcggcggccgcggcggctgcagctccagggagggggtctgagtcgcctgtcaccatttccagggctgggaacgccggagagttggtctctccccttctactgcctccaacacggcggcggcggcggcggcacatccagggacccgggccggttttaaacctcccgtccgccgccgccgcaccccccgtggcccgggctccggaggccgccggcggaggcagccgttcggaggattattcgtcttctccccattccgctgccgccgctgccaggcctctggctgctgaggagaagcaggcccagtcgctgcaaccatccagcagccgccgcagcagccattacccggctgcggtccagagccaagcggcggcagagcgaggggcatcagctaccgccaagtccagagccatttccatcctgcagaagaagccccgccaccagcagcttctgccatctctctcctcctttttcttcagccacaggctcccagacatgacagccatcatcaaagagatcgttagcagaaacaaaaggagatatcaagaggatggattcgacttagacttgacctatatttatccaaacattattgctatgggatttcctgcagaaagacttgaaggcgtatacaggaacaatattgatgatgtagtaaggtttttggattcaaagcataaaaaccattacaagatatacaatctttgtgctgaaagacattatgacaccgccaaatttaattgcagagttgcacaatatccttttgaagaccataacccaccacagctagaacttatcaaacccttttgtgaagatcttgaccaatggctaagtgaagatgacaatcatgttgcagcaattcactgtaaagctggaaagggacgaactggtgtaatgatatgtgcatatttattacatcggggcaaatttttaaaggcacaagaggccctagatttctatggggaagtaaggaccagagacaaaaagggagtaactattcccagtcagaggcgctatgtgtattattatagctacctgttaaagaatcatctggattatagaccagtggcactgttgtttcacaagatgatgtttgaaactattccaatgttcagtggcggaacttgcaatcctcagtttgtggtctgccagctaaaggtgaagatatattcctccaattcaggacccacacgacgggaagacaagttcatgtactttgagttccctcagccgttacctgtgtgtggtgatatcaaagtagagttcttccacaaacagaacaagatgctaaaaaaggacaaaatgtttcacttttgggtaaatacattcttcataccaggaccagaggaaacctcagaaaaagtagaaaatggaagtctatgtgatcaagaaatcgatagcatttgcagtatagagcgtgcagataatgacaaggaatatctagtacttactttaacaaaaaatgatcttgacaaagcaaataaagacaaagccaaccgatacttttctccaaattttaaggtgaagctgtacttcacaaaaacagtagaggagccgtcaaatccagaggctagcagttcaacttctgtaacaccagatgttagtgacaatgaacctgatcattatagatattctgacaccactgactctgatccagagaatgaaccttttgatgaagatcagcatacacaaattacaaaagtctgaatttttttttatcaagagggataaaacaccatgaaaataaacttgaataaactgaaaatggacctttttttttttaatggcaataggacattgtgtcagattaccagttataggaacaattctcttttcctgaccaatcttgttttaccctatacatccacagggttttgacacttgttgtccagttgaaaaaaggttgtgtagctgtgtcatgtatatacctttttgtgtcaaaaggacatttaaaattcaattaggattaataaagatggcactttcccgttttattccagttttataaaaagtggagacagactgatgtgtatacgtaggaattttttccttttgtgttctgtcaccaactgaagtggctaaagagctttgtgatatactggttcacatcctacccctttgcacttgtggcaacagataagtttgcagttggctaagagaggtttccgaaaggttttgctaccattctaatgcatgtattcgggttagggcaatggaggggaatgctcagaaaggaaataattttatgctggactctggaccatataccatctccagctatttacacacacctttctttagcatgctacagttattaatctggacattcgaggaattggccgctgtcactgcttgttgtttgcgcatttttttttaaagcatattggtgctagaaaaggcagctaaaggaagtgaatctgtattggggtacaggaatgaaccttctgcaacatcttaagatccacaaatgaagggatataaaaataatgtcataggtaagaaacacagcaacaatgacttaaccatataaatgtggaggctatcaacaaagaatgggcttgaaacattataaaaattgacaatgatttattaaatatgttttctcaattgtaaaaaaaaaa

SEQ ID NO: 46 - DNA, 1224 bp, Human
gggcaggaagacggcgctgcccggaggagcggggcgggcgggcgcgcgggggagcgggcggcgggcgggagccaggcccgggcgggggcgggggcggcggggccagaagaggcggcgggccgcgctccggccggtctgcggcgttggccttggctttggctttggcggcggcggtggagaagatgctgcagtccctggccggcagctcgtgcgtgcgcctggtggagcggcaccgctcggcctggtgcttcggcttcctggtgctgggctacttgctctacctggtcttcggcgcagtggtcttctcctcggtggagctgccctatgaggacctgctgcgccaggagctgcgcaagctgaagcgacgcttcttggaggagcacgagtgcctgtctgagcagcagctggagcagttcctgggccgggtgctggaggccagcaactacggcgtgtcggtgctcagcaacgcctcgggcaactggaactgggacttcacctccgcgctcttcttcgccagcaccgtgctctccaccacaggttatggccacaccgtgcccttgtcagatggaggtaaggccttctgcatcatctactccgtcattggcattcccttcaccctcctgttcctgacggctgtggtccagcgcatcaccgtgcacgtcacccgcaggccggtcctctacttccacatccgctggggcttctccaagcaggtggtggccatcgtccatgccgtgctccttgggtttgtcactgtgtcctgcttcttcttcatcccggccgctgtcttctcagtcctggaggatgactggaacttcctggaatccttttatttttgttttatttccctgagcaccattggcctgggggattatgtgcctggggaaggctacaatcaaaaattcagagagctctataagattgggatcacgtgttacctgctacttggccttattgccatgttggtagttctggaaaccttctgtgaactccatgagctgaaaaaattcagaaaaatgttctatgtgaagaaggacaaggacgaggatcaggtgcacatcatagagcatgaccaactgtccttctcctcgatcacagaccaggcagctggcatgaaagaggaccagaagcaaaatgagccttttgtggccacccagtcatctgcctgcgtggatggccctgcaaaccattgagcgtaggatttgttgcattatgctagagcac

SEQ ID NO: 47 - DNA, 4465 bp, Human
caattgtcatacgacttgcagtgagcgtcaggagcacgtccaggaactcctcagcagcgcctccttcagctccacagccagacgccctcagacagcaaagcctacccccgcgccgcgccctgcccgccgctcggatgctcgcccgcgccctgctgctgtgcgcggtcctggcgctcagccatacagcaaatccttgctgttcccacccatgtcaaaaccgaggtgtatgtatgagtgtgggatttgaccagtataagtgcgattgtacccggacaggattctatggagaaaactgctcaacaccggaatttttgacaagaataaaattatttctgaaacccactccaaacacagtgcactacatacttacccacttcaagggattttggaacgttgtgaataacattcccttccttcgaaatgcaattatgagttatgtcttgacatccagatcacatttgattgacagtccaccaacttacaatgctgactatggctacaaaagctgggaagccttctctaacctctcctattatactagagcccttcctcctgtgcctgatgattgcccgactcccttgggtgtcaaaggtaaaaagcagcttcctgattcaaatgagattgtggaaaaattgcttctaagaagaaagttcatccctgatccccagggctcaaacatgatgtttgcattctttgcccagcacttcacgcatcagtttttcaagacagatcataagcgagggccagctttcaccaacgggctgggccatggggtggacttaaatcatatttacggtgaaactctggctagacagcgtaaactgcgccttttcaaggatggaaaaatgaaatatcagataattgatggagagatgtatcctcccacagtcaaagatactcaggcagagatgatctaccctcctcaagtccctgagcatctacggtttgctgtggggcaggaggtctttggtctggtgcctggtctgatgatgtatgccacaatctggctgcgggaacacaacagagtatgcgatgtgcttaaacaggagcatcctgaatggggtgatgagcagttgttccagacaagcaggctaatactgataggagagactattaagattgtgattgaagattatgtgcaacacttgagtggctatcacttcaaactgaaatttgacccagaactacttttcaacaaacaattccagtaccaaaatcgtattgctgctgaatttaacaccctctatcactggcatccccttctgcctgacacctttcaaattcatgaccagaaatacaactatcaacagtttatctacaacaactctatattgctggaacatggaattacccagtttgttgaatcattcaccaggcaaattgctggcagggttgctggtggtaggaatgttccacccgcagtacagaaagtatcacaggcttccattgaccagagcaggcagatgaaataccagtcttttaatgagtaccgcaaacgctttatgctgaagccctatgaatcatttgaagaacttacaggagaaaaggaaatgtctgcagagttggaagcactctatggtgacatcgatgctgtggagctgtatcctgcccttctggtagaaaagcctcggccagatgccatctttggtgaaaccatggtagaagttggagcaccattctccttgaaaggacttatgggtaatgttatatgttctcctgcctactggaagccaagcacttttggtggagaagtgggttttcaaatcatcaacactgcctcaattcagtctctcatctgcaataacgtgaagggctgtccctttacttcattcagtgttccagatccagagctcattaaaacagtcaccatcaatgcaagttcttcccgctccggactagatgatatcaatcccacagtactactaaaagaacgttcgactgaactgtagaagtctaatgatcatatttatttatttatatgaaccatgtctattaatttaattatttaataatatttatattaaactccttatgttacttaacatcttctgtaacagaagtcagtactcctgttgcggagaaaggagtcatacttgtgaagacttttatgtcactactctaaagattttgctgttgctgttaagtttggaaaacagtttttattctgttttataaaccagagagaaatgagttttgacgtctttttacttgaatttcaacttatattataagaacgaaagtaaagatgtttgaatacttaaacactatcacaagatggcaaaatgctgaaagtttttacactgtcgatgtttccaatgcatcttccatgatgcattagaagtaactaatgtttgaaattttaaagtacttttggttatttttctgtcatcaaacaaaaacaggtatcagtgcattattaaatgaatatttaaattagacattaccagtaatttcatgtctactttttaaaatcagcaatgaaacaataatttgaaatttctaaattcatagggtagaatcacctgtaaaagcttgtttgatttcttaaagttattaaacttgtacatataccaaaaagaagctgtcttggatttaaatctgtaaaatcagatgaaattttactacaattgcttgttaaaatattttataagtgatgttcctttttcaccaagagtataaacctttttagtgtgactgttaaaacttccttttaaatcaaaatgccaaatttattaaggtggtggagccactgcagtgttatctcaaaataagaatattttgttgagatattccagaatttgtttatatggctggtaacatgtaaaatctatatcagcaaaagggtctacctttaaaataagcaataacaaagaagaaaaccaaattattgttcaaatttaggtttaaacttttgaagcaaacttttttttatccttgtgcactgcaggcctggtactcagattttgctatgaggttaatgaagtaccaagctgtgcttgaataacgatatgttttctcagattttctgttgtacagtttaatttagcagtccatatcacattgcaaaagtagcaatgacctcataaaatacctcttcaaaatgcttaaattcatttcacacattaattttatctcagtcttgaagccaattcagtaggtgcattggaatcaagcctggctacctgcatgctgttccttttcttttcttcttttagccattttgctaagagacacagtcttctcatcacttcgtttctcctattttgttttactagttttaagatcagagttcactttctttggactctgcctatattttcttacctgaacttttgcaagttttcaggtaaacctcagctcaggactgctatttagctcctcttaagaagattaaaagagaaaaaaaaaggcccttttaaaaatagtatacacttattttaagtgaaaagcagagaattttatttatagctaattttagctatctgtaaccaagatggatgcaaagaggctagtgcctcagagagaactgtacggggtttgtgactggaaaaagttacgttcccattctaattaatgccctttcttatttaaaaacaaaaccaaatgatatctaagtagttctcagcaataataataatgacgataatacttcttttccacatctcattgtcactgacatttaatggtactgtatattacttaatttattgaagattattatttatgtcttattaggacactatggttataaactgtgtttaagcctacaatcattgatttttttttgttatgtcacaatcagtatattttctttggggttacctctctgaatattatgtaaacaatccaaagaaatgattgtattaagatttgtgaataaatttttagaaatctgattggcatattgagatatttaaggttgaatgtttgtccttaggataggcctatgtgctagcccacaaagaatattgtctcattagcctgaatgtgccataagactgaccttttaaaatgttttgagggatctgtggatgcttcgttaatttgttcagccacaatttattgagaaaatattctgtgtcaagcactgtgggttttaatatttttaaatcaaacgctgattacagataatagtatttatataaataattgaaaaaaattttcttttgggaagagggagaaaatgaaataaatatcattaaagataactcaggagaatcttctttacaattttacgtttagaatgtttaaggttaagaaagaaatagtcaatatgcttgtataaaacactgttcactgttttttttaaaaaaaaaacttgatttgttattaacattgatctgctgacaaaacctgggaatttgggttgtgtatgcgaatgtttcagtgcctcagacaaatgtgtatttaacttatgtaaaagataagtctggaaataaatgtctgtttatttttgtactattta

SEQ ID NO: 48 - DNA, 631 bp, Human
caatacagctaaggaattatcccttgtaaataccacagacccgccctggagccaggccaagctggactgcataaagattggtatggccttagctcttagccaaacaccttcctgacaccatgagggccagcagcttcttgatcgtggtggtgttcctcatcgctgggacgctggttctagaggcagctgtcacgggagttcctgttaaaggtcaagacactgtcaaaggccgtgttccattcaatggacaagatcccgttaaaggacaagtttcagttaaaggtcaagataaagtcaaagcgcaagagccagtcaaaggtccagtctccactaagcctggctcctgccccattatcttgatccggtgcgccatgttgaatccccctaaccgctgcttgaaagatactgactgcccaggaatcaagaagtgctgtgaaggctcttgcgggatggcctgtttcgttccccagtgaagggagccggtccttgctgcacctgtgccgtccccagagctacaggccccatctggtcctaagtccctgctgcccttccccttcccacactgtccattcttcctcccattcaggatgcccacggctggagctgcctctctcatccactttccaataaa

SEQ ID NO: 49 - DNA, 701 bp, Human
  misc_feature (464)..(464): n is a, c, g, or t
tttttttttcgcataaatattgcttttattacaagaaagaagagaccacctctgaagtaaggcacaacacaattccattgtcactgtggcagaagtccctgttgctcatccctttgatctcagccaagactgtggtccacgggcctaaggcacttgagcttttccctcaactgaagtgtagggggtgcctgagagctgagcctcgtgggagtgtccatggtctctggacctgcatcgaagttcatgtgtttccactggtgctgaagatgaacatcaagaattactagacatgtaaaagtgtctttaagtgtctttcctcctgagtccacctttggcaatggtccccaaagcctggccccttagagatgcagctccagatcctggccaccctcagggttcaaagagactggcccaggggtacacaattgctggaatattctctgcgagtcatgcacacgtgcggnggtgaggtgcagttatatggtgacacacacagtgttactgtgagctctcagggtgcacagagggcaggtgacaagggcatcagctaatctgtcccacctggtccagcccatccagttcaggggcatcaagggggctgaggccccggtagccactgtagaccctgtgactatcactgacaccgtcactgggctccattgggcaaatgtagtccgcgattcatcgaacttcttttttct

SEQ ID NO: 50 - DNA, 602 bp, Human
atttagaaatgtaaacatttatttaaaagtaggtagcaagttaaaaatgaatacttgcctgaaatcataaaacataatcaagttctttttaaaacagttaatttttttcctataatttactttcatcgaaagtatattatctttgtttaacatgctagatagaagcaatttagcaacataaaatatattagctatagtatgttcaaaagaatgagaaatataaattcagagatgagaccatcattttttgcagttaaaaaaaaatgttgattctggtgcaacatacactgattatccaggttttacattttagggctgaaaccctgaggaacctgctggtgactgtttagcactgagcagagttcagtgtgcatgcgcttccagagttaaaagctaaagcagactgagaaacaaaaaaccaacatctttgcatttctgagttttcacttgtaatcataggttttcccaaattattagaatgtctataccttagctgttttactagaatgatttatgctagtatagtcacttgtttagaagtcggaaaaagatcattttttctttttagaaattactaagctctgttgtactacagctgatcc

SEQ ID NO: 51 - DNA, 1653 bp, Human
acgtccggggaggggccaggtgagcggcagacccggcacgcaggtgggggccggcggggtccgtggccagagctgcagagagacaaggcggcggcggctgctgtgctgggtgcagtgaggaagaggccctcggtggtgcccatggctggccaggatcctgcgctgagcacgagtcacccgttctacgacgtggccagacatggcattctgcaggtggcaggggatgaccgctttggaagacgtgttgtcacgttcagctgctgccggatgccgccctcccacgagctggaccaccagcggctgctggagtatttgaagtacacactggaccaatacgttgagaacgattataccatcgtctatttccactacgggctgaacagccggaacaagccttccctgggctggctccagagcgcatacaaggagttcgataggaaagacggggatctcactatgtggcccaggctggtctcgaactccaagctcaagcgatcctcccacctcagcctcccaaagtactgggattacaggtacaagaagaacttgaaggccctctacgtggtgcaccccaccagcttcatcaaggtcctgtggaacatcttgaagcccctcatcagtcacaagtttgggaagaaagtcatctatttcaactacctgagtgagctccacgaacaccttaaatacgaccagctggtcatccctcccgaagttttgcggtacgatgagaagctccagagcctgcacgagggccggacgccgcctcctaccaagacaccaccgccgcggcccccgctgcccacacagcagtttggcgtcagtctgcaatacctcaaagacaaaaatcaaggcgaactcatcccccctgtgctgaggttcacagtgacgtacctgagagagaaaggcctgcgcaccgagggcctgttccggagatccgccagcgtgcagaccgtccgcgagatccagaggctctacaaccaagggaagcccgtgaactttgacgactacggggacattcacatccctgccgtgatcctgaagaccttcctgcgagagctgccccagccgcttctgaccttccaggcctacgagcagattctcgggatcacctgtgtggagagcagcctgcgtgtcactggctgccgccagatcttacggagcctcccagagcacaactacgtcgtcctccgctacctcatgggctttctgcatgcggtgtcccgggagagcatcttcaacaaaatgaacagctctaacctggcctgtgtcttcgggctgaatttgatctggccatcccagggggtctcctccctgagtgcccttgtgcccctgaacatgttcactgaactgctgatcgagtactatgaaaagatcttcagcaccccggaggcacctggggagcacggcctggcaccatgggaacaggggagcagggcagcccctttgcaggaggctgtgccacggacacaagccacgggcctcaccaagcctaccctacctccgagtcccctgatggcagccagaagacgtctctagtgttgcgaacactctgtatgtttcgagctacctcccacacctgtctgtgcacttgtatgttttgtaaacttggcatctgtaaaaataaccagccattagatgaattcagaaccttct

SEQ ID NO: 52 - DNA, 846 bp, Human
gtataaggtccacaccccgggagctgagtgattgcagaaactggccttccatctctctcagacaccaagctgcagatccaggcttttctgggaaagtgaggccaccatggctctggagaagtctcttgtccggctccttctgcttgtcctgatactgctggtgctgggctgggtccagccttccctgggcaaggaatcccgggccaagaaattccagcggcagcatatggactcagacagttcccccagcagcagctccacctactgtaaccaaatgatgaggcgccggaatatgacacaggggcggtgcaaaccagtgaacacctttgtgcacgagcccctggtagatgtccagaatgtctgtttccaggaaaaggtcacctgcaagaacgggcagggcaactgctacaagagcaactccagcatgcacatcacagactgccgcctgacaaacggctccaggtaccccaactgtgcataccggaccagcccgaaggagagacacatcattgtggcctgtgaagggagcccatatgtgccagtccactttgatgcttctgtggaggactctacctaaggtcagagcagcgagataccccacctccctcaacctcatcctctccacagctgcctcttccctcttccttccctgctgtgaaagaagtaactacagttagggctcctattcaacacacacatgcttccctttcctgagtcccatccctgcgtgattttgggggtgaagagtgggttgtgaggtgggccccatgttaacccctccactctttctttcaataaaacgcagttgcaaacaataaaaaaaaaaaaaaaaaaaaaaaaaaaaaa

SEQ ID NO: 53 - DNA, 2566 bp, Human
ggcacgagttgtgctcctcgcttgcctgttccttttccacgcattttccaggataactgtgactccaggcccgcaatggatgccctgcaactagcaaattcggcttttgccgttgatctgttcaaacaactatgtgaaaaggagccactgggcaatgtcctcttctctccaatctgtctctccacctctctgtcacttgctcaagtgggtgctaaaggtgacactgcaaatgaaattggacaggttcttcattttgaaaatgtcaaagatataccctttggatttcaaacagtaacatcggatgtaaacaaacttagttccttttactcactgaaactaatcaagcggctctacgtagacaaatctctgaatctttctacagagttcatcagctctacgaagagaccctatgcaaaggaattggaaactgttgacttcaaagataaattggaagaaacgaaaggtcagatcaacaactcaattaaggatctcacagatggccactttgagaacattttagctgacaacagtgtgaacgaccagaccaaaatccttgtggttaatgctgcctactttgttggcaagtggatgaagaaatttcctgaatcagaaacaaaagaatgtcctttcagactcaacaagacagacaccaaaccagtgcagatgatgaacatggaggccacgttctgtatgggaaacattgacagtatcaattgtaagatcatagagcttccttttcaaaataagcatctcagcatgttcatcctactacccaaggatgtggaggatgagtccacaggcttggagaagattgaaaaacaactcaactcagagtcactgtcacagtggactaatcccagcaccatggccaatgccaaggtcaaactctccattccaaaatttaaggtggaaaagatgattgatcccaaggcttgtctggaaaatctagggctgaaacatatcttcagtgaagacacatctgatttctctggaatgtcagagaccaagggagtggccctatcaaatgttatccacaaagtgtgcttagaaataactgaagatggtggggattccatagaggtgccaggagcacggatcctgcagcacaaggatgaattgaatgctgaccatccctttatttacatcatcaggcacaacaaaactcgaaacatcattttctttggcaaattctgttctccttaagtggcatagcccatgttaagtcctccctgacttttctgtggatgccgatttctgtaaactctgcatccagagattcattttctagatacaataaattgctaatgttgctggatcaggaagccgccagtacttgtcatatgtagccttcacacagatagacctttttttttttccaattctatcttttgtttccttttttcccataagacaatgacatacgcttttaatgaaaaggaatcacgttagaggaaaaatatttattcattatttgtcaaattgtccggggtagttggcagaaatacagtcttccacaaagaaaattcctataaggaagatttggaagctcttcttcccagcactatgctttccttctttgggatagagaatgttccagacattctcgcttccctgaaagactgaagaaagtgtagtgcatgggacccacgaaactgccctggctccagtgaaacttgggcacatgctcaggctactataggtccagaagtccttatgttaagccctggcaggcaggtgtttattaaaattctgaattttggggattttcaaaagataatattttacatacactgtatgttatagaacttcatggatcagatctggggcagcaacctataaatcaacaccttaatatgctgcaacaaaatgtagaatattcagacaaaatggatacataaagactaagtagcccataaggggtcaaaatttgctgccaaatgcgtatgccaccaacttacaaaaacacttcgttcgcagagcttttcagattgtggaatgttggataaggaattatagacctctagtagctgaaatgcaagaccccaagaggaagttcagatcttaatataaattcactttcatttttgatagctgtcccatctggtcatgtggttggcactagactggtggcaggggcttctagctgactcgcacagggattctcacaatagccgatatcagaatttgtgttgaaggaacttgtctcttcatctaatatgatagcgggaaaaggagaggaaactactgcctttagaaaatataagtaaagtgattaaagtgctcacgttaccttgacacatagtttttcagtctatgggtttagttactttagatggcaagcatgtaacttatattaatagtaatttgtaaagttgggtggataagctatccctgttgccggttcatggattacttctctataaaaaatatatatttaccaaaaaattttgtgacattccttctcccatctcttccttgacatgcattgtaaataggttcttcttgttctgagattcaatattgaatttctcctatgctattgacaataaaatattattgaactacc

SEQ ID NO: 54 - DNA, 555 bp, Human
  misc_feature (9)..(10): n is a, c, g, or t
tttttattnnttcagttctgggtctatagaaacccagggggattttcatttgctacaacagattcccttctaataaaatgcactggcaaggtgaccagtgagtgacccaatgtctggttgggaaatctctctctgaacttcttgctgttggacctaaaatgtggatgtaaattggatcacagctggtttggcattgaaaaaaatacatacacaacaaacaattacaacttctttatatggcagtttttactgggtgtctaatactctctttactgtctcaagtggaagtccaaacaaatttcatttttgtagtaaaaaatctttatttccaaaatgatttgttagccaaaagaactataaaccacctaacaagactttggtaagaaagagacttgatgcttcttataaattccccattgcaaacaaaaaataacaatccaacaagagtcatgttacccattcttagccattaacctggttttaagtctccaaaatcaggattttaaaatgtacccaactgggaccaaatacaaacatgagacactagggtggctt

SEQ ID NO: 55 - DNA, 1984 bp, Human
ggatccagagatttagattttttataagctttcctgccaccgaaacgggtgtttgggacctcacgaggccctgttcattcttcgtcgctgcgctccccactctgtactggatgcatttactgacgttgttgtctccgtccccagagtatgaacccccaaggtgactcatgcagctgtgggtgcccggcatacagcatggtgactggaatggatgagcacccaataaacatttgttgcaggaatgcaggaggacgggcaggccagcaagcaggctgcctggtttttcccacatgggcttttctgggaaagaagagcttctatttttggaaagggctgctatgattgagaaaagttcatggcagcaaaaaaaggacagacgtcgggagggaaacactcctagttctcccagacaacacattttttaaaaagactccttcatctctttaataataacggtaacgacaatgacaatgatgattacttatgagtgcggctagtgccagccactgtgttgtcactgggcgagtaatgatctcattggatcttcacggtgggcgtgcggggctccagggacagcctgcgttcctgggctggctgggtgcagctctcttttcaggagagaaagctctcttggaggagctggaaaggtgcccgactccagccatgctggcgctactgtgttcctgcctgctcctggcagccggtgcctcggacgcctggacgggcgaggactcggcggagcccaactctgactcggcggagtggatccgagacatgtacgccaaggtcacggagatctggcaggaggtcatgcagcggcgggacgacgacggcacgctccacgccgcctgccaggtgcagccgtcggccacgctggacgccgcgcagccccgggtgaccggcgtcgtcctcttccggcagcttgcgccccgcgccaagctcgacgccttcttcgccctggagggcttcccgaccgagccgaacagctccagccgcgccatccacgtgcaccagttcggggacctgagccagggctgcgagtccaccgggccccactacaacccgctggccgtgccgcacccgcagcacccgggcgacttcggcaacttcgcggtccgcgacggcagcctctggaggtaccgcgccggcctggccgcctcgctcgcgggcccgcactccatcgtgggccgggccgtggtcgtccacgctggcgaggacgacctgggccgcggcggcaaccaggccagcgtggagaacgggaacgcgggccggcggctggcctgctgcgtggtgggcgtgtgcgggcccgggctctgggagcgccaggcgcgggagcactcagagcgcaagaagcggcggcgcgagagcgagtgcaaggccgcctgagcgcggcccccacccggcggcggccagggacccccgaggcccccctctgcctttgagcttctcctctgctccaacagacaccttccactctgaggtctcaccttcgcctctgctgaagtctccccgcagccctctccacccagaggtctccctataccgagacccaccatccttccatcctgaggaccgccccaaccctcggagccccccactcagtaggtctgaaggcctccatttgtaccgaaacaccccgctcacgctgacagcctcctaggctccctgaggtacctttccacccagaccctccttccccaccccataagccctgagactcccgcctttgacctgacgatcttcccccttcccgccttcaggttcctcctaggcgctcagaggccgctctggggggttgcctcgagtccccccacccctccccacccaccaccgctcccgcggcaagccagcccgtgcaacggaagccaggccaactgccccgcgtcttcagctgtttcgcatccaccgccaccccactgagagctgctcctttgggggaatgtttggcaacctttgtgttacagattaaaaattcagcaattca

SEQ ID NO: 56 - DNA, 1621 bp, Human
ggcacgaggggacagctcctgcctcccgcagggcccacctgtgtcccccagcgccgctccacccagcaggcctgagcccctctctgctgccagacaccccctgctgcccactctcctgctgctcgggttctgaggcacagcttgtcacaccgaggcggattctctttctctttctctttctcttctggcccacagccgcagcaatggcgctgagttcctctgctggagttcatcctgctagctgggttcccgagctgccggtctgagcctgaggcatggagcctcctggagactgggggcctcctccctggagatccacccccagaaccgacgtcttgaggctggtgctgtatctcaccttcctgggagccccctgctacgccccagctctgccgtcctgcaaggaggacgagtacccagtgggctccgagtgctgccccaagtgcagtccaggttatcgtgtgaaggaggcctgcggggagctgacgggcacagtgtgtgaaccctgccctccaggcacctacattgcccacctcaatggcctaagcaagtgtctgcagtgccaaatgtgtgacccagccatgggcctgcgcgcgagccggaactgctccaggacagagaacgccgtgtgtggctgcagcccaggccacttctgcatcgtccaggacggggaccactgcgccgcgtgccgcgcttacgccacctccagcccgggccagagggtgcagaagggaggcaccgagagtcaggacaccctgtgtcagaactgccccccggggaccttctctcccaatgggaccctggaggaatgtcagcaccagaccaagtgcagctggctggtgacgaaggccggagctgggaccagcagctcccactgggtatggtggtttctctcagggagcctcgtcatcgtcattgtttgctccacagttggcctaatcatatgtgtgaaaagaagaaagccaaggggtgatgtagtcaaggtgatcgtctccgtccagcggaaaagacaggaggcagaaggtgaggccacagtcattgaggccctgcaggcccctccggacgtcaccacggtggccgtggaggagacaataccctcattcacggggaggagcccaaaccactgacccacagactctgcaccccgacgccagagatacctggagcgacggctgctgaaagaggctgtccacctggcgaaaccaccggagcccggaggcttgggggctccgccctgggctggcttccgtctcctccagtggagggagaggtggggcccctgctggggtagagctggggacgccacgtgccattcccatgggccagtgagggcctggggcctctgttctgctgtggcctgagctccccagagtcctgaggaggagcgccagttgcccctcgctcacagaccacacacccagccctcctgggccagcccagagggcccttcagaccccagctgtctgcgcgtctgactcttgtggcctcagcaggacaggccccgggcactgcctcacagccaaggctggactgggttggctgcagtgtggtgtttagtggataccacatcggaagtgattttctaaattggatttgaattcggaaaaaaaaaaaaaaaaaa

SEQ ID NO: 57 - DNA, 2755 bp, Human
cctacccgcgcgcaggccaagttgctgaatcaatggagccctccccaacccgggcgttccccagcgaggcttccttcccatcctcctgaccaccggggcttttcgtgagctcgtctctgatctcgcgcaagagtgacacacaggtgttcaaagacgcttctggggagtgagggaagcggtttacgagtgacttggctggagcctcaggggcgggcactggcacggaacacaccctgaggccagccctggctgcccaggcggagctgcctcttctcccgcgggttggtggacccgctcagtacggagttggggaagctctttcacttcggaggattgctcaacaaccatgctgggcatctggaccctcctacctctggttcttacgtctgttgctagattatcgtccaaaagtgttaatgcccaagtgactgacatcaactccaagggattggaattgaggaagactgttactacagttgagactcagaacttggaaggcctgcatcatgatggccaattctgccataagccctgtcctccaggtgaaaggaaagctagggactgcacagtcaatggggatgaaccagactgcgtgccctgccaagaagggaaggagtacacagacaaagcccatttttcttccaaatgcagaagatgtagattgtgtgatgaaggacatggcttagaagtggaaataaactgcacccggacccagaataccaagtgcagatgtaaaccaaactttttttgtaactctactgtatgtgaacactgtgacccttgcaccaaatgtgaacatggaatcatcaaggaatgcacactcaccagcaacaccaagtgcaaagaggaaggatccagatctaacttggggtggctttgtcttcttcttttgccaattccactaattgtttgggtgaagagaaaggaagtacagaaaacatgcagaaagcacagaaaggaaaaccaaggttctcatgaatctccaaccttaaatcctgaaacagtggcaataaatttatctgatgttgacttgagtaaatatatcaccactattgctggagtcatgacactaagtcaagttaaaggctttgttcgaaagaatggtgtcaatgaagccaaaatagatgagatcaagaatgacaatgtccaagacacagcagaacagaaagttcaactgcttcgtaattggcatcaacttcatggaaagaaagaagcgtatgacacattgattaaagatctcaaaaaagccaatctttgtactcttgcagagaaaattcagactatcatcctcaaggacattactagtgactcagaaaattcaaacttcagaaatgaaatccaaagcttggtctagagtgaaaaacaacaaattcagttctgagtatatgcaattagtgtttgaaaagattcttaatagctggctgtaaatactgcttggttttttactgggtacattttatcatttattagcgctgaagagccaacatatttgtagatttttaatatctcatgattctgcctccaaggatgtttaaaatctagttgggaaaacaaacttcatcaagagtaaatgcagtggcatgctaagtacccaaataggagtgtatgcagaggatgaaagattaagattatgctctggcatctaacatatgattctgtagtatgaatgtaatcagtgtatgttagtacaaatgtctatccacaggctaaccccactctatgaatcaatagaagaagctatgaccttttgctgaaatatcagttactgaacaggcaggccactttgcctctaaattacctctgataattctagagattttaccatatttctaaactttgtttataactctgagaagatcatatttatgtaaagtatatgtatttgagtgcagaatttaaataaggctctacctcaaagacctttgcacagtttattggtgtcatattatacaatatttcaattgtgaattcacatagaaaacattaaattataatgtttgactattatatatgtgtatgcattttactggctcaaaactacctacttctttctcaggcatcaaaagcattttgagcaggagagtattactagagctttgccacctctccatttttgccttggtgctcatcttaatggcctaatgcacccccaaacatggaaatatcaccaaaaaatacttaatagtccaccaaaaggcaagactgcccttagaaattctagcctggtttggagatactaactgctctcagagaaagtagctttgtgacatgtcatgaacccatgtttgcaatcaaagatgataaaatagattcttatttttcccccacccccgaaaatgttcaataatgtcccatgtaaaacctgctacaaatggcagcttatacatagcaatggtaaaatcatcatctggatttaggaattgctcttgtcatacccccaagtttctaagatttaagattctccttactactatcctacgtttaaatatctttgaaagtttgtattaaatgtgaattttaagaaataatatttatatttctgtaaatgtaaactgtgaagatagttataaactgaagcagatacctggaaccacctaaagaacttccatttatggaggatttttttgccccttgtgtttggaattataaaatataggtaaaagtacgtaattaaataatgtttttggtaaaaaaaaaaaaaaaaaaaaaaaaaaaaaaaaaaaaaaaaaaaaaaaaaaaaaaaaaaaaaaaaaaa

SEQ ID NO: 58 - DNA, 2553 bp, Human
ctaaaggccttgcacaacatcagagagttcatactggagagaaccttacacatttcacgagtatggaaagacctttgctcaaaattcagcccttgtaatgcataaggcaattcatactggaaagaaaccttacacatgtaatgaatgtggcaaggtttttagtagaaaagcacaccttgcatgtcatcatagacttcatactgtctaaggtttctaatcaacaatcaaaccttgcacaacatcagagagtttatactggagagaaaccttacaagtgtaatgagtggggcaaagccttaagtgggaagtcgtcacttttttatcatcaagcaatccatggtgtagggaaactttgcaaatgtaatgattgtcacaaagtcttcagtaatgctacaaccattgcaaatcactggagaatccataatgaagacagatcttacaagtgtaataaatgtggtaaaattttcagacatcgatcatatcttgcagtttatcagcgaactcatactggagagaaaccttacaaatatcatgactgtggcaaggtcttcagtcaagcttcatcctatgcaaaacataggagaattcatacaggagagaaacctcacaagtgtgatgattgtggcaaagtcttgacttcacgttcacacctcattagacatcagagaatccatactggacagaaatcttacaaatgtcttaagtgtggcaaggtcttcagtctgtgggcactccatgcagaacatcagaaaattcatttttgagataactgttccaaatacagtgactatagaagatcataaagctttaattgacattagagccaaataggcattgacttgagattgagttgacttaaccttgagtttaagaattaatttacattaaagtgtttatgttaagaagattgggccaggtgggattacaggcgcgagcaccgcgcccggcccctaagttaatatttcaaacaatcgaaggtaaaacaacatattgtgttgggccacctgtactgaacgctgaatcgtttttcctcttaagttgaaaatggttttaatgcaaagcgcctttttttgagcaggtagagtcacgcatccggcaggcggggcgagctcccctctgtctggggcagggtgggggagaggggcagggacctcggtaaaggggtggagtggcgcgctggttgccgcgggcactggcaattagaagggattattaaactaagcaaggtcctgggttgtttgagtggataatggaaactgaaaggtgacgtgcaaaactgcctattactcccaggagtggaggataatttcatatttcatggaaataaactcagggcccggagcggtggctcacacctgtaatcccagcactttgagaggccaaggagggaggatcgcttaagcccaggaattcgaaatcagcctaggcaacatagtaagacctcatctctactaaaaataaaaaaaaacagccaggtgtgttagtccacacctgtggtcccagctgcctcagcttcccgagtagctgggattacaggtatgaaccactatgcccggctaactttgttttttttttttagaaattaaaccttttttcagcttaatgacccaggggtgtatttttgaaggacttgggagctctctttgaaaggcaaacaacaagggaaacagtacctttatctcagtaggaaattaaataattcaaacatcaaataacttcaatttaaggctatggactttgagataattctgagccttgagaggaatgtggtcaggcaacctgagtccagtggaatgcaggtgcaacttctaagagttttcctgtaagtaattaagaagactaagtagccccagagataagacctcctcggatcattgtcccttcttatgtagtgataaagtaaccttccttgaagtgtatctatccgtaatcaatcaagttgctgcagcctatgcactggcccagaataaaaaacgtggtgattctgctaaagcttctctgtctttccctgtgtgtgaaatcttaacgtctctacttgggaacgctgatcccattcatttagagttgatgtttccacgtggctatttccaagctttgccttcaaataaattctgtacttaatcatatattctaaattttattatttactgctgacatcagtttctgtcggattgtaggagcctcaccagagagggcccctgtcgccatgttgtaaaactcacacttgccaaaagttgtgggttagggtttctccccctccctcaggatgacgctagttagctgacacagatggtcacctccattaccaagtagagtcaggatgaactatgtgtgactgttcaactatgtgtcctcttccctgaggactgattagtgtttatcttgaaaacatgtccttaatgggttgtatagaacactgaagcatctgatttcaaactcttagctcttttcctctatttcccatcacattctggtctaaggcttatttattaataaaatgatttttatttctttaaacaaaaaaaactttagagcacactggggtaccggatc

SEQ ID NO: 59 - DNA, 452 bp, Human
gcggccgcgttgatccacagggcgctgttcagaaagcccaggaaagcaaagagccagtgaagcctggggggctggctgtcagatgtggcaaaaaaggtcactgaagccaaggctgtgcctgcgatcaccaccacgacccagacgggaacgaggccgcctatctcatagacaccataggtccccgactgcagggtcaggaccacaaccagggggctgataaccagatgcagacagttgaggggccgtttccagttctggtcatccttgtccgggtccacgacggggactgtgaggagcagcaggaactccacaggcagcttgaacaccttgagggctttccagtatgctgatttccttctccacttcatgtaatccaggggattgagggcccggaccaggatctgagccgtggtctcctggtagaagaacagcggccggtactcatcaccgta

SEQ ID NO: 60 - DNA, 1130 bp, Human
ggcccttagagtcttggttgccaaacagatttgcagatcaaggagaacccaggagtttcaaagaagcgctagtaaggtctctgagatccttgcactagctacatcctcagggtaggaggaagatggcttccagaagcatgcggctgctcctattgctgagctgcctggccaaaacaggagtcctgggtgatatcatcatgagacccagctgtgctcctggatggttttaccacaagtccaattgctatggttacttcaggaagctgaggaactggtctgatgccgagctcgagtgtcagtcttacggaaacggagcccacctggcatctatcctgagtttaaaggaagccagcaccatagcagagtacataagtggctatcagagaagccagccgatatggattggcctgcacgacccacagaagaggcagcagtggcagtggattgatggggccatgtatctgtacagatcctggtctggcaagtccatgggtgggaacaagcactgtgctgagatgagctccaataacaactttttaacttggagcagcaacgaatgcaacaagcgccaacacttcctgtgcaagtaccgaccatagagcaagaatcaagattctgctaactcctgcacagccccgtcctcttcctttctgctagcctggctaaatctgctcattatttcagaggggaaacctagcaaactaagagtgataagggccctactacactggcttttttaggcttagagacagaaactttagcattggcccagtagtggcttctagctctaaatgtttgccccgccatccctttccacagtatccttcttccctcctcccctgtctctggctgtctcgagcagtctagaagagtgcatctccagcctatgaaacagctgggtctttggccataagaagtaaagatttgaagacagaaggaagaaactcaggagtaagcttctagaccccttcagcttctacacccttctgccctctctccattgcctgcaccccaccccagccactcaactcctgcttgtttttcctttggccataggaaggtttaccagtagaatccttgctaggttgatgtgggccatacattcctttaataaaccattgtgtacataa

SEQ ID NO: 61 - DNA, 3323 bp, Human
tgcttcataaaatttacctaagcaagtggtcttgcttgcctcaaatccaagcagtcttgaacacttggaggcaattaatgagtatatcttagtcaaaagaattgttggagctttttattaaagctgcagtttcagttctgcttttggggaattgtgctatgaaagcagctgccaaaataagctcatttattttcttcaatcccactcagtgctcagtcactatattctgtttcctttttttttttcaagttgcatatttggtttccccttatgattgggaaagatgaattttcagcagaaaacagtgtttgttcactttcaaagagtgatagtttctaaaacatttagagcaataaatattcatcagaggtaccaagtaagccagcagaagagttaagggttagagaaatcccttatttcatgtcttgactctaaaatgatcaaagtacttttccttgtaatgtggatttcttcttatgcggatatgcaaaaacttcagttatacgtagtaatgctagcaggtaattttagtggacattttataacaactgtcactttgttttgccacatgtagagtttgttcagctattttccagatatctccccacaaaaggaggcaaagggtaccagcttttcaatgagcattacctattacttggcaaagatgatgaagactctattaatagttcatttgataaatgttgacataaccaacaatagagattaggaagttagttttaagaaatcaatagcatatagacattaccctcatggagtttgtattctactacttgaactgattgtagctataaaagcatagttagatagctgaatagttagatcataagcaaagaaggccagaacacatctcttatcaagaaatcaatgaatagtttatctcatttttaaagcaactttatccttctttaattccttcctttcttctagtgcaaaactacttaataaggttggtgtttaggttagtgttcacaccattcctcatctggtgtgaattaccttctctttctttactatttactaccaacctagtacatgtgttgactgaattcttttcaaacaatgttgagttatcatggtgcacctaataaattaacaccacagattacagcatccttgctgattttctcagcaaagccagattagatggaaataaacaaagaaaatgatcctagagtgaatttttctagaaaatatctattatgaaccatgctgtttaaagtattagcttgaaggtgatggatccagctattcagaaaataactttcatataaccatgattttgcacagtatgaggtcttaaatgtgtggaaagagataaattttttatcattaccacaaaccccttttaaagattcaaaggtggaagaaagtgatttattttttctcttcagcatacatatataaaagacttgtcagatgtttaatttggggaggttgataatgaaacatatcaacagagtatagtagttatagtagtgtttgtgggtaaataatttcctggggtcagacatatataaacatatttgcttcaaaatgataaaggcatgaaatcagtcttaaaaattgaaatgggggtgatgggggagaaaaagaagaacaaatttgaagtgccctttcaaatctgctggatacaagtattgaagttttaagtcatcttattctgtctgaaagtgtatttttcattctacaatagacccaatcaacaagacgtataacttgagttgcatgatgttcagtttatgtaatctactgttgggatggtaagaattgatgtaggctgtggtgtaagaatgaattaaaatatagtttcactggcttttctctacatatccactatcacaatggctaggtttcctgttgctcactgttggattctggagaaaaatttaatgaaagatgatatcagaggaagaataagtggaggtagagaagaaaggagtgatagaggaggggaaaaaaacaaaacatatttttgtgttatccaaaggagctttttccttattctgtcaagcattgagatcttcttcagctttcaatgtagttgctaaatacaaataatgctactaggtagtgactaaatatagcaaacacttcatcagatattagaattaggtcacactattgaggttataatctgaaggttgtgttacatagaaaccactttagattattatcaacttgggctaggctttattttataatagcatagtaagtaatatctattgtgtcatttcttcaaccattttattctaagatccatgaagcttcttgaggccaaataaaataataagtttagacaagaagtagattgtgactttttttcccttagagatactatttactatctcctatcctgataggtggaaggtttactgaattggaaattggttgactattagtttttaactaaaatgtgcaataacacattgcagtttcctcaaactagtttcctatgatcattaaactcattctcagggttaagaaaggaatgtaaatttctgcctcaatttgtacttcatcaataagtttttgaagagtgcagatttttagtcaggtcttaaaaataaactcacaaatctggatgcatttctaaattctgcaaatgtttcctggggtgacttaacaaggaataatcccacaatatacctagctacctaatacatggagctggggctcaacccactgtttttaaggatttgcgcttacttgtggctgaggaaaaataagtagttcgaggaagtagtttttaaatgtgagcttatagatagaaacagaatatcaacttaattatgaaattgttagaacctgttctcttgtatctgaatctgattgcaattactattgtactgatagactccagccattgcaagtctcagatatcttagctgtgtagtgattcttgaaattctttttaagaaaaattgagtagaaagaaataaaccctttgtaaatgaggcttggcttttgtgaaagatcatccgcaggctatgttaaaaggattttagctcactaaaagtgtaataatggaaatgtggaaaatatcgtaggtaaaggaaactacctcatgctctgaaggttttgtagaagcacaattaaacatctaaaatggctttgttacaccagagccatctggtgtgaagaactctatatttgtatgttgagagggcatggaataattgtattttgctggcaatagacacattctttattatttgcagattcctcatcaaatctgtaattatgcacagtttctgttatcaataaaacaaaagaatcctgttaaaaaaaaaaaaaaaaaaaaa

SEQ ID NO: 62 - DNA, 737 bp, Human
gggaatgccctaacaacacccatgcttgtgttgctgggagctgacattcaagaaaagtgcattaaaaattccttgagaaggcatattcttttgagagccgtaaatgaaaagtgcattcacggagaacatgctcctttgttgtgagaggaaagaaaggactgttgttgcctttaaggaacaggtttcccagttccccggaatgtcagggtcacatgaggaatgggtgagcacttagggccaagattgtcgtgtgcttggcccggcagcttctctctaagtgacctctccagcatcactctgtgccagtgctcatatctgaggccacttgagtgtcacgaggcagagcctggaaacattagctttggaaaccgttccttcctttttatgtggaggaaagtaaggtttcacaagacacctaagctggacatggtgatgtgccacttggatagttcccaaaagcagaaagcagcaggacatcccagtaccccacttctccgtgccgtgtactttcagggaggttctcgaaagctagcttctttaccgatgatttgtctatgtactggttatggtggaaaaccttgcatttattacctggtcctatctcagagtcttctattcagcattcaatatgacttctaatgcttctaattggactgtatggacagagaaccggtttgtcattcacgggccgcggatataatcagagcctggaatccgccaaaaggtcggtgccggat

SEQ ID NO: 63 - DNA, 3780 bp, Human
tactggacaaacatttcctccaaggacacagctctctgcctccatgtcaccacctttgaaggactgactgattccctcggctggtgccagtgcctgctcctgccatggggcccgcggggagcctgctgggcagcggacagatgcagatcaccctgtggggaagtctggcagctgtcgccattttcttcgtcatcaccttcctcatcttcccgtgctctagttgtgacagggaaaagaagccgcgacagcatagtggggaccatgagaacctgatgaacgtgccttcagacaaggagatgttcagccgttcagttactagcctggcaacagatgctcctgccagcagtgagcagaatggggcactcaccaatggggacattctttcagaggacagtactctgacctgcatgcagcattacgaggaagtccagacatcggcctcggatctgctggattcccaggacagcacagggaaaccaaaatgtcatcagagtcgggagctgcccagaatccctcccgagagcgcagtggataccatgctcacggcgagaagtgtggacggggaccaggggctggggatggaagggccctatgaagtgctcaaggacagctcctcccaagaaaacatggtggaggactgcttgtatgaaactgtgaaggagatcaaggaggtggctgcagctgcacacctggagaaaggccacagtggcaaggcaaaatctacttctgcctcgaaagagctcccagggccccagactgaaggcaaagctgagtttgctgaatatgcctcggtggacagaaacaaaaaatgtcgtcaaagtgttaatgtagagagtatccttggaaattcatgtgatccagaagaggaggccccaccacctgtccctgttaagcttctggacgagaatgaaaaccttcaggagaaggaagggggagaggcggaagagagtgccacagacacgaccagtgaaactaacaagagatttagctcattgtcatacaagtctcgggaagaagaccccactctcacagaagaagagatctcagctatgtactcatcagtaaataaacctggacagttagtgaataaatcggggcagtcgcttacagttccggagtccacctacacctccattcaaggggacccacagaggtcaccctcctcctgtaatgatctctatgctactgttaaagacttcgaaaaaactccaaacagcacacttccaccagcagggaggcccagcgaggagccagagcctgattatgaagcgatacagactctcaacagagaggaagaaaaggccaccctggggaccaatggccaccacggtctcgtcccaaaggagaacgactacgagagcataagtgacttgcagcaaggcagagatattaccaggctctagcaacccagaagacaaccctgggtagcctgtgatcagtgtctggagacgtttcttctgtggaagagaagaagtgacacaaacctatacttcatatgctgctttagtcacctgaagatggttggagaggccctgtcgactgttctcccagttgttcagtttctgagacagagaggtacggactaggctgcacctgagtgtgcccctgcctgccagatggacaggtacacccaagcacatctccctgctgcaccctcaccacccacaaaagatcccagctgtcagtggtctcatctcattagtgaggaaagccaagctgtatggaaaagctgcactcaccaaggaccacaatgcccccggcctaaagtactgccattcagaaaagcaggtttttcttcctctctttccttttctctgtctgctactgactttaaggctttttcccccttgaaatgtccagattcctgtggttcatcccaaggaaattttcacacaaagcttggcctttgccctcaatataggtgttttaggatggtgacaaaccatggctgctgctttctgcccagctcgccagtcctccccaaagagttgcgcatcagcacctggggatctggaccctgcgggtgaagggatggggagggacgtccctggagtctcttctgtctttgttccttcttattttggcattcgatatcagcagcctctccccaaagtacttgaagtcagttttagatgctttattttatttttctagtcaaaaacgtgtttcccccagtgtttgaaaactcgtccgaatcttttcagtattttccatgagtattgtggtacttctagacttgtttaagcccagaactcattccttcaaaacagagagccttaatctttatgttgggacacagaccacatatttggacggcagccatgcatccatcgctgaagggctgtggacatgaatgtgtatttcccatggtctccgctgcccacaccaacagtgtggcatctcataagttaactgctaccctaaggtaatctaagattaaaatgtaaacatttatttttgttatgtaagtttataagatgttttatgttcaatgcctaatttctcaaaagtgccagaaaaaaatgtatattagctattttgattttatgtacaatgatttatactctccttttgaaaagataccataaagcacataagctagatcactacaaggagctgttatcttttttctaatcaagtgtttaaaacactgatggtttttaaagactcacctttttaaatggtacttggagctcctgattcaaattacctagaccccctagagaaataaatggaatatacataaataatcattttcagtggtttatggtgggcaatattgcaatatttgaaatggtaaaaatggaaagaagaacaaaatatgatgagaggtggctgtgaattataaacctcataaaagtgtcataattccattaaggtttaattatattttttcagaaaacagtgatgaattctgtagtccagtgcttgccaatgcaaattgcctattggaatcttcttcctatattttacaaacatcagtggctgaaatagctcagagtaagagctcagcctggtttgaatttaatcatctctttagatcttataaggccagcattaggaaacttgttcacttttcattttcaaaggagcctagttgaagtgctattatgagtgtgggctatggaaagacagcttttcctacactgataaagaaaaaaaatgaggaaattatttcatccccttgtgacatctgtgactttttggatttaataatcttgctgtttttcctctttatgacaaagaatataattgggaggatgaagtgtcttaaaaattgtagagaccagctcactggaatgtttttccatccctgtattcatggcttgactttgtgactgctctacactgcatgtctgacattgcagagtgagctatgttgaggtaaactggttggttgtcattattttgcaatcagcctggtctctcccatgaagatgtcgtgtgcataagcacaatcatcactgattagaagatcacagcagaatacccttggattagagagaagttcgtaccttgcatttctctgaattctagtctctcataagcactgctttgctggatgattttcactgctttgtgttaatgactttgagcgatctctcacatgatggggttctttagtacatggtaacagccatgtcatcttacacacctagcattgtgaatgctgtagtgacatcctttataggcaccttacagctcaaaacttttgtttcatttcatgccttacttatcaaaaaggcaggaaagtaggtatgatctctaaagtaaaaaaaa

SEQ ID NO: 64 - DNA, 437 bp, Human
gtgatggtgggtttttgttttattttttataaaacacttgcactcaagaacatacaaacagtggccaccaatccccacccctggggctccggggagcaccatggcttgtttgtggctgttttcctctgtcccttccctggcatctggtgccagagggcaggtgcgggggtcctggggcgggtggaatttgtacagcactttcatggggagatggtcacaagaaaggaaaccaggacaagataaggactaagtctagggcacccacaaagatggcagacgaagcccatgaaagggcctgcgacagagtgaagagacggatgggcctgcgttggcctcagctagctctggaggctctgtgggggaggggcaggtgggccttgcagtcaggattcggtaattacactttgctcacgggtagcaccttcggagtcctcctg

SEQ ID NO: 65 - DNA, 566 bp, Human
tacgttttatcaactgccaagatcctttattttttccaggccccttcctgcccactccacatcggggcagctccagcataagggagatgacatgatgaaggggctaagagtagggcctggccagcatccactgagggcccaaccagggaacagttgctagccgctctcttccatgcagctggagcactagcaaggccttccagaggctcccagggcgacctccacatcactcccgcttgtctctgccctccagggtgctccgggcctcctctccctgtgtaccctagaggtgtgagggccacagtcctcctcaggtgaacctccctccccaagcccagggccctagcacaggctgcagttggacggcttcgagctgcggctctgggcctgctgccgctggtattctgcctcactggctgacagtgcttgtgctaaagctaggtcttcttcctcctgacaacttggaaactggggtttgggttctgccagggacatttccagggcccctgcagagttcatcctcactcaggccatttgcaagaatcactggaggggctgtcagaagg

SEQ ID NO: 66 - DNA, 566 bp, Human
ttttttttgagcaaagagctttttattcaaagaaagaggcaaattgcacccaatctctctccctgtaagatctcatctggttttgacatcagttgcaatgctttcagtctgaggctaagcaaaatgttatgctgtgaatggtcaccacagagagaccactgtgttgctggtgtggggaggcgaggctcagggttggacaggttaattacctacataaccctggctgtggcccagcccagcacctcccaaaacagggactgacatggctgaggtctaccttggagatggggtcagtgaagaggggaggcagggtcagcctctgtgcaagtaaaatgccccctcaccccagccttcctttccagagcaaccaatctgaaaacagaattgcctttggggctggtgttgtacctctgctttcaggccaagatggattccctagaagaggagtttgaagcccaatgtgcaaggacatttctcaagggccatgtggttttgcagacactgctgtcctcaggcctgaactcaccatggaaacccatgtcagcaaacagtgaccagcaaatcct

SEQ ID NO: 67 - DNA, 3510 bp, Human
agaagccgttcagatgtgagaactgcaatgagcgcttccagtacaagtaccagctgcggtcacacatgagcatccacattggccacaagcagttcatgtgccaatggtgcggcaaggacttcaacatgaagcagtacttcgatgagcacatgaagacccacacaggagagaagccgtacatctgcgagatctgtggcaagagcttcaccagccggcccaacatgaagcggcaccggcgcacgcacacgggcgagaagccgtacccgtgcgacgtgtgtggccagcgcttccgcttctccaacatgctcaaggcccacaaggagaagtgcttccgcgtcagccacaccctggccggcgacggcgtccccgctgccccaggcctgcccccaacccagccccaggcgcacgcactgcccctgctcccggggctgccccagaccctgccgcccccgccccacctgccgcccccgcctccgctcttccccaccactgccagccccggcgggaggatgaacgccaacaactagctgccgagctgcacccgtgcacccgctggggcctggagtcagggcccactccaggagggacccactgccttcccggggagcacagtagtgcgggcctgggccctgctccacctccagaagtggctggatgtaccctgcctgaggccccgacgaggaggggtatgcaggctggcaggccccagagctggtggagggcatctcactcccaagtgccccccctttctgtgactccttgaagcctttacttttttttttttttggaagtgaaggaaaaagaaactatttacagcactcccctccaggtgaggggggtgctgggggtctgcagcagaaagaaaggggcctgggcagcaggtgtggccagtccctctgccaaggcctgtgccagaggggttggccagttggagcctgggtcagcctcagcagcctatccccatgtcctctatgcccctaatttgcttcctcatcttggagggtttggggagaagttggcgtgccacccccacaacccctgaggaggtgtagacccagtctgagagccgcaagcactgaggcagggcctgagactggacctgggtgagcgtggggggtggagggtggcgaggtgcggagactgcagaccagtgcttcactgtgtggagtggggcaggcaggggctggaccccagggacttgccttccccacccactctgctgccagcaggcccagggatccctgacctgcaccaggtggcaccaagggtcctgagtcctggagatgtccccagaagctgctgtgcctcacagcgctgtgagccagaccctccttgggcagacaggctgactggcagcaccagctttgggggcagagtcctaggatgaggcttgggcagtgctggtagggtttcaaggtgctattagtggggcaggggcagggcggctgctcacagagcaccccagttcctcaccagctactctggccatatatcccacaccagaaggaacaagtgtggctgtgtccatctctgctcccccaaaggcccgctctaggccttatcctccctctaggtcctgccacaacctgtccctggctggctccagcgtcctcgtccctcctgggcctgtgcaccggtgggtggggcgcccatagcactgccggtaaaggagcctgcatgttcaggcccctcgggggattggggggactggggaggcgcagcctagacccaattgcttgcccccatgaggctagcactaataggaaacccttttttgttgtcatttaatgtctttattcctgcctttaatatggggaggaaggttccataagctacatgtttcctagttaagctctttcctattgtgtttatacagttttgtttgttatactctttgcaccttaaacccccaccactccccgacactattgccttcccagcatggctggagtgggaagaggcttgggccccgggggaatggttagggggactgaacccctctgaccttatgaggcccatggcactggggcagggagctggggacattttaatcatcaataaacgaagcactttattctgtacagatttgggcaggcccaaggtgcccgagtgatctgaggatttataatccaagccacaccaccctggttgttctctgggcttggagggtacagtgccagcagcttccttgcccaattgatgttggagctgtagacgtacgctcaggcgctcctgctgtcctgggggagagaaggttcgcccctccccgaggaagaaggcttctggtcaggacccccaccccaaggctggggactccaggctcctgctttactgtagctctttttcttccttgcactccttgatctttgggcttccgtgatgtcctcagggtccccccctccctgttgctatttttaatctctagtcccagtgcctggcagctctttggagctggctcacattttcccaaaaaaaagttgatctctcccagtgggctgtaggcagggtcctccatgggtttccaacccccatcactggcaccaggatctcccacaggcactggtggtgtcatcacctgctggccccactacagcctgagtaggcctgagtggccgtggccaggctgagacctgtcaggccatactgacaagcagaggtcagagacactggtggggagctggcaatgaaaccctgtcctgggacatgggtttcatgttcttgtacacttcccctctgggatcaggtgaggggtccagacagctgaccagacagcttgacagctggtcaagacggtcacgggagctctaggtgggcacaaccaacccctctcctgggaggcccctgccccactggggataggagcctgtgtccctggtgctaagcactctcttcacttgggccattgttggtgggggctcctttccggccagaccacaaggccagaagcaataatggcacctcagcagttccagtatggataggggttcctgttttactagcttttacatctttttatttaaaacaaaacaacacaaaaaaacaatgtgcccccagatgtcagaatgaggcgactagggcaccatactcactttccagggctgggggaagggggacgcaggatcatcccctcccaaggagatctgtgggggtcccaccgtccatctggacttctcagcctgtttggctagaactcaggcctggagtctgggtctgccccctccccggctccttggggctctctggtctcaggccagctggcgatgggtggctagagtgatgaactcaagccctgtggccacagttctgggagccttcaaccctggctcatgctgccatagtctccacggtgcccttcacagagggcttggtagtggcagaatggccatgcccaggtgtgtgttgagaccattgacaactgctcgtgtacaggcaccccacagccccagagcatggggcacagcaggcatgcgagtgagaggatgaaggggaataaagtcagtacaactcgtg

SEQ ID NO: 68 - DNA, 2800 bp, Human
gcctccccccggggcactgaggcctccccacctcagaacaacagcggcagtagttctcctgtcttcaccttccgccacccgcttctgtcatctggtggcccccagtccccactccgaggatccacaggctccctgaagtcttccccgtccatgtcccatatggaggccctgggcaaggcctggaaccggcagctcagccgtcccctctcccaggctgtgtcattcagcaccccctttggcctggacagcgacgtggatgtcgtcatgggagaccctgtgctcctccgctctgtgagctcggacagcctgggccccccgcgtcccgcgccggccaggacccccacccagccacccccggagcctggtgacctgcccaccatcgaggaagctctgcagatcatccacagtgccgagccccggctcctcccagatggggcggccgacggcagcttctacctccactcccctgaggggccctccaagccatccctggcctccccctacctgcccgaggggacctccaaaccactgtccgacaggcccaccaaagcaccagtgtacatgccacaccccgagaccccctcgaaaccatctccctgtctggtgggggaggcatcgaaaccgccagccccatccgaggggtccccgaaggcggtggcttcgtccccagcagccaccaactccgaggtgaaaatgaccagctttgcagaacgcaagaaacagctggtgaaggcagaggctgaggccggagcggggtcccccacgtccactccggccccgccggaggccctgagctcggagatgagtgagctcagcgcccggctggaggagaaacgcagagccatcgaggctcagaagcgacggattgaggccatattcgccaagcaccgccagcggctgggcaaaagcgccttcctgcaggtgcagccgcgggaagcctctggggaggcggaagcagaggcggaggaggccgattccggtccagtccctggtggggagcggcccgcaggcgagggccagggtgagccaacctcacggcccaaggcagtgaccttctcgccagacctgggcccggtgccccacgaggggctgggggaatacaatcgagcggtcagcaagctgagtgccgccttgagctcgctgcagcgggacatgcagaggctcacggaccagcagcagcggctcctggccccgcccgaggcccccggatccgccccaccacctgctgcgtgggtcatccctggccccacgacggggcccaaagctgcatcccccagccccgcccggcgagtcccggccacccggcgcagccctgggcccgggcccagccagtcaccccgcagcccgaaacacacgcggccagcggagctgcggctggcacccttgaccagggtgcttacgccaccccacgacgtagacagcctcccccacctgcgcaagttctcgccgagccaggtgcccgtgcagacgcgctcttccatcctcctggcggaggagacgccccccgaggagccagccgcccggccgggcctcatcgagatcccgctgggcagcctggcagatcccgccgccgaggacgagggagacgggagccccgctggtgctgaggattccttggaggaggaggcgtcttcggagggggagccccgggtggggctggggttcttctacaaggatgaagacaagcctgaggacgagatggcccaaaagcgggccagcctgctggagcggcagcagcggcgagcagaggaggcgcggcggcgcaagcagtggcaggaggtggagaaggaacagcggagggaggaggccgcgaggctggcccaagaggaggccccgggcccagccccgcttgtgtccgcagtcccgatggcgactccagcccctgctgcccgggctccagccgaggaggaggtgggcccccggaagggggacttcacgcggcaggagtacgagcgccgggcccagctgaagctgatggacgacctcgataaggtgctgcggccccgggctgcggggtccgggggtccaggtcggggcgggcggagggccacccggcctcgctcgggttgctgtgacgactcagccctggcacgaagcccagcccgcggcctgctgggctctcggctgagcaaaatctattcccagtccaccctgtcactgtccactgtggccaacgaggcccacaataacctcggggtgaagaggcccacgtctcgggctccctccccgtcaggtctcatgtccccaagccgcctgcctggaagccgcgaacgggactgggaaaatggcagcaatgcctcctccccagcgtcagtgcccgagtacacaggtccacggctgtacaaagaacccagcgccaagtccaacaagttcatcatccacaatgccctatcacactgctgcctggcgggcaaggtgaacgaaccgcagaagaatcgcattctggaggaaattgagaaaagcaaggccaaccacttcctgatcctctttcgcgactcgagctgccagttccgggcgctctacacgctgtcgggggagacagaggagctgtcgcggctggcagggtatgggccccggaccgtcacgcccgccatggtggaaggcatctacaagtacaactcggaccgcaagcgcttcacccagatccccgccaagaccatgtccatgagcgtcgatgccttcaccatccagggacacctctggcagggcaagaaacccaccactcccaagaagggcggcggcacccccaaatagccccacccgggcggtccacgggccgggccctgtgtgctgcggccgc

SEQ ID NO: 69 - DNA, 1634 bp, Human
aaaggtaagagcactttattcttatttgaaccacactgtattgttgattaccgagtgtgaaggtagtatgttcagagtcttgttttatgcctttgtagctgtgttgccagcatttgaaggtaactcctccacataagcggcaggaaaatggccttttttcccattcaaagatccaaaccaccatccttcttcttttttctcgtgtataatcacaatgtcacccttttccaaattcaactcatcatcttgcctggcttgaaaagaatacaaggccttgcaaagtctgctgctgagctgggctgcaccaggggctggagttgaagaacctggattgctctgcccaccagaagatgccttgctcacaatattctctaatctcttcattaaaaaaggccgagatattttcacatagctatgagtatgctccttttccctccacctgaagatggaattactacaaggatggctgggttgaggtctttgctcaagttctgctaacattgatgacagtttgtaggagttcgcttccaaaaggtctagtttcaaattgttctcatccattaacgctgctgtgtctttctggctctttgcatcagagaaggaggaggtgctggagtacgttttaagcattcgttccaggccttccttgtcttttgaggctttttcaatgtctctctgcagtctcaataattttggttttagtaaagactttcgtctctctttatccattgcactgttaggatcttcttcaaagtaatccgttaacaggaactcagatttgttttctgtagataaaattgcagtttcttccattacagcctggatatctttttcaatgtcaatcttgctgatggcacagtgaatctgcgtgtggcatgtggtcagggtttggccaaaaagagaaatatgttggctgtactggtttaagttattgcataaaagttgaattctttccttctccagctccagaatgctctggtagcagttctctagtgtgttttcccatttcagtctggtagaataacccgccatgtttttttggtagtaattttcatcttccttttccaacttttcagttgattttgtcagtttattgaggagcttccgcttctccttctcagtcatagattgcttggagctttctacaagctggaaaagtgcttcatgtttcttggtactaaccattaatttcttcttggccttaatttgctgattccagttgctaatgacaagatttgctgtcttttcaacttcattgtcaagtgattttctcttcttctcttgtacatttaggacttgataagtcggttttattgcttccaattcaattgctttgccaagtttttgatgcaggtccgctgtggatttcattccctctgaggcccaggcccaggcactgctaacacaactttttctcgtgttctgtaatgctttgctcagcttgcttgccagtttctgaagtcctttggcatagctaatttccaggtttgccctttgctgaagaacagatgtgacctgtttgcagaaattctctccattttgagaaaactcctttaggttcttgtatactttattatacggacaatctgtcagtgggtccctcatgttgaaatgtgtctggcttttgtcctttc

SEQ ID NO: 70 - DNA, 774 bp, Human
  misc_feature (465)..(465): n is a, c, g, or t
  misc_feature (509)..(509): n is a, c, g, or t
  misc_feature (617)..(617): n is a, c, g, or t
  misc_feature (636)..(636): n is a, c, g, or t
  misc_feature (667)..(667): n is a, c, g, or t
  misc_feature (693)..(693): n is a, c, g, or t
  misc_feature (740)..(740): n is a, c, g, or t
  misc_feature (762)..(762): n is a, c, g, or t
accaaaccaaatcattttattgtgcaatttccttctaccagaaaattactaaaaatataaatattaactctctaaaaaatactcagaatagatctgtaatcttcctcctcctcctccgaactggagccaatcttcttctttaaacgctgatggattgcatacatgtatgtcttccatatcagccacatacacaacattcagatacacttccctctgtgcagggggatacaccagcctcctgccaggttctggaagctcaccttataatctaccaggataaagctgtgtgctgagtaggaggttatggtggggttggggagtaacaaggagataaaagaccttgtggtcccaacttccttatgtggacagagaagataggtcctttactcctcctcattaccctgccctctcatggactgggctaactgaaggccaagctcccagagaagctggactcactgtgtnggattactgagggtgtggctgccaggctacagtcacaggaaggncagactgttgagatggacatggaaaccaggtgaggcttggatggaaagctggtctgggccaagggctctggcaggatgagtagtaagctgtttcctggctgggctttnggcagcccctagaccctangcaccaggtactatgtgcagcatcttaaganccagacaccagtcttcagagagcctnccgaggtagccgcaacattcctgcagcaggggacgggcaggttgtangcagttagattggagccaggtnccatggcactgt

SEQ ID NO: 71 - DNA, 578 bp, Human
tttttttttttttttttacatgcaataccacaaatttattataatacacagggaaaaacaaactcaaactttgacaacatccacagaatgttccagtctttaaaaagttagcagaaataaagggtaatggaaagaatataatctcgtaattttatacttaaggctgtaaatggcaaagtcccatagatatttaaaaatctatatttgtatttatttataatatagatataggccctcaaggattcatagagatttatgtaataaactagattttggtactatttattttgttgttgttgttgcttgttaggtaagcaaacccaaacaaattaagtcctgaaaagtgggatgaaatcccaaaggaactctatgagaccacacagaactcttttaataaatatggcccatacaaattccatatccagtgaaaatcattttgatccacaatcatgttgatgtttctatggaggatacttctagcagctgtgatttcttttgtagcattctggctctccacttctattcatataattgagtatgtgttttattacatgttagcttataggcaagttaaacat

SEQ ID NO: 72 - DNA, 475 bp, Human
  misc_feature (285)..(285): n is a, c, g, or t
  misc_feature (361)..(361): n is a, c, g, or t
gggtttgcacagtttattaagataatcaatcaatttcttaagttattcctttgttaaccagacagcatctctggagagaaaatgcactctctgtgtagatacataaaaatacatcagtcattttgcccctcctggatgtgaacggaatctcccctcctcacctccacagagggagctcaagccccagggaaccttcccctccccttttatgcattaccaggggagtggcaggggcagcccccaactgtggagtgcattcaggtctgaggggggaggaaggctcanaggggcatctccccagcaccctgccacagtgctggcttctggggtgtttgttcagcggcctgctgggctgccccangctgggggctcccccagctccccgtgcatcctggcttgttccacggagccctgagccaagtctttgtctggctcatgttcctctcacaacatcccacaggcaggggtgagcctg

SEQ ID NO: 73 - DNA, 512 bp, Human
catgtaaaactgacttttattacaattaaaaaagaacaaagacaatttgataagtgcctttaattacaacatacctgctatttacatgtaatcatacttttatatatagcttgaataagttttattacatgtaaactataagatattacaagttaaactccagtcttttctggatattcaattgaaatactactggcagaaacatacagaaaacaaatacccatttcagttcctcaggtaccattactggttgaatgatcaagatctggccacagaagagaagtggaaatatgcatcaaaacaaaacttattcttaacatgactaacagtattgttatttaaaccctaaacataattaataattggatcattaaaaacacatcttcaatttatatagcacctttcttccgaagagttgaaagcattcgtgcttatctctattatttcgtttgtccccataacatctctatgaggtaggcaatggttagtatcattatccccattttgtatat

SEQ ID NO: 74 - DNA, 668 bp, Human
tttcaaaaccagcaaaaattaaatttaattgggctcaagtctgggcagtttgtccttcctcaggaccagccgtcagcagtccctgacgaaagcaccccattctctccacagacagctggttccaaaaggaccctctgaggctggtcttccgggtaggatgtgctgtgggagggttctgtttccgaggaggagaggcgcgacacagcgtgcaaggacctgcagcaccttccacgcagcaccccctgctcctcctcctcagcccctgccgggctctgactcctaaagtaaggcaggagcttcttcaggcccctggctgaggaagagccacagccaccctaaaatggcttcgggggcatgcagccctccatctccagcagctctggccatccctcgtatttgttggtgtctgggctgttctttaagaactgctcaaaggggctgttacccctgaggtctttggctcctatgaagacccagctgtcccggaagcccagttgttttgcgtaggaactccccaagtcagagaagagtttcctgctttcatcgatcattttggtcgctggatcgtcgtaggaggccaccaacaccagtgcaccccgcggaaatatcttatggaatttcactaggtgcataacttctcctaagtgcatgtcaaatgcctgctggcg

SEQ ID NO: 75 - DNA, 568 bp, Human
aaggaataaggtgaatttttattaagtgaaaaaaatcaataacaatataggaatgatcacatctatacaaatacattgctacatttctacatataaaatgtataggaaaaagtctgaaagaatgcacaccaaattattctgtttttaggaaaagcagtaggattggtcagggcatggaatgtcggctaagtgaagtgagatttaaaatttttattctacatgattttctagtgttgggaatttttgacagtgagcatacatgcacttattacttgcataattctgaaaactattttaaaaacaacagagaatatatgaaagtctattggtgtatacagcattaatagtagtgaaagtttaacagaaaagatctgaaaatctcccaaagttatatagaaacagatctagctgacacactgtgtacctagaaatgattttggatctcttcacagagacccctatcccaccaacctccaatcctcccaccatacattgatccctttctatctgcttggatcattagctgtaaatttaacttcgaaaaacaaagtacgtttaatcattgtac

SEQ ID NO: 76 - DNA, 491 bp, Human
  misc_feature (371)..(371): n is a, c, g, or t
  misc_feature (394)..(394): n is a, c, g, or t
ttagattgaagaaaacataacgtttaattctcagaaacaaatgcaagcctcggtccaagtcttccttcccaaacctttgtcatttagggattgagaagctgagttgggtgaaaggttgaatagaaaacaaaaaggaaagctagaaacacgctgagctcatggagatgcagcttcttctgtagctcctaaaggcccagctgaggtatcatctaatgagaattctctctatgccaggcactgcgctaagattttcacatcattaaccaatgtgagttttaggcaaccccgaagcaggcagtctgttcatcccaattgcagctgaggaaacaggggtgaggtgaggccaagcagctgggcccaagggtcccctncctgggtaagtgggcacagctgncagccctgccagggtggggtcctgctaaccaagccggcgttttcttgtcaccatgccgtattcgccttcccgtactatcaaaatgtacttatccaat

SEQ ID NO: 77 - DNA, 2437 bp, Human
tcggatccactagtaacggccgccagtgtgctggaattcgcggccggtcgacccaccaccatgaggtcctgcctgtggagatgcaggcacctgagccaaggcgtccagtggtccttgcttctggctgtcctggtcttctttctcttcgccttgccctcttttattaaggagcctcaaacaaagccttccaggcatcaacgcacagagaacattaaagaaaggtctctacagtccctggcaaagcctaagtcccaggcacccacaagggcaaggaggacaaccatctatgcagagccagtgccagagaacaatgccctcaacacacaaacccagcccaaggcccacaccaccggagacagaggaaaggaggccaaccaggcaccgccggaggagcaggacaaggtgccccacacagcacagagggcagcatggaagagcccagaaaaagagaaaaccatggtgaacacactgtcacccagagggcaagatgcagggatggcctctggcaggacagaggcacaatcatggaagagccaggacacaaagacgacccaaggaaatgggggccagaccaggaagctgacggcctccaggacggtgtcagagaagcaccagggcaaagcggcaaccacagccaagacgctcattcccaaaagtcagcacagaatgctggctcccacaggagcagtgtcaacaaggacgagacagaaaggagtgaccacagcagtcatcccacctaaggagaagaaacctcaggccaccccaccccctgcccctttccagagccccacgacgcagagaaaccaaagactgaaggccgccaacttcaaatctgagcctcggtgggattttgaggaaaaatacagcttcgaaataggaggccttcagacgacttgccctgactctgtgaagatcaaagcctccaagtcgctgtggctccagaaactctttctgcccaacctcactctcttcctggactccagacacttcaaccagagtgagtgggaccgcctggaacactttgcaccaccctttggcttcatggagctcaactactccttggtgcagaaggtcgtgacacgcttccctccagtgccccagcagcagctgctcctggccagcctccccgctgggagcctccggtgcatcacctgtgccgtggtgggcaacgggggcatcctgaacaactcccacatgggccaggagatagacagtcacgactacgtgttccgattgagcggagctctcattaaaggctacgaacaggatgtggggactcggacatccttctacggctttaccgccttctccctgacccagtcactccttatattgggcaatcggggtttcaagaacgtgcctcttgggaaggacgtccgctacttgcacttcctggaaggcacccgggactatgagtggctggaagcactgcttatgaatcagacggtgatgtcaaaaaaccttttctggttcaggcacagaccccaggaagcttttcgggaagccctgcacatggacaggtacctgttgctgcacccagactttctccgatacatgaagaacaggtttctgaggtctaagaccctggatggtgcccactggaggatataccgccccaccactggggccctcctgctgctcactgcccttcagctctgtgaccaggtgagtgcttatggcttcatcactgagggccatgagcgcttttctgatcactactatgatacatcatggaagcggctgatcttttacataaaccatgacttcaagctggagagagaagtctggaagcggctacacgatgaagggataatccggctgtaccagcgtcctggtcccggaactgccaaagccaagaactgaccggggccagggctgccatggtctccttgcctgctccaaggcacaggatacagtgggaatcttgagactctttggccatttcccatggctcagactaagctccaagcccttcaggagttccaagggaacacttgaaccatggacaagactctctcaagatggcaaatggctaattgaggttctgaagttcttcagtacattgctgtaggtcctgaggccagggatttttaattaaatggggtgatgggtggccaataccacaattcctgctgaaaaacactcttccagtccaaaagcttcttgatacagaaaaaagagcctggatttacagaaacatatagatctggtttgaattccaggatcgagtttacagttgtgaaatcttgaaggtattacttaacttcactacagattgtctagaagacctttctaggagttatctgattctagaagggtctatacttgtccttgtctttaagctatttgacaactctacgtgttgtagaamactgataataatacaaatgattgttgtccatggaaaggcaaataaattttctacagtgaaaaaaaa

SEQ ID NO: 78 - DNA, 582 bp, Human
ttccagatcaaattattatttatttcaataagactattgcgaggcattaaaaaaactaaatagtaatattacaaaatctatatacttgcacatttagtatttgtcaatgtgccagaggttttcttcatgaaatttgacttctttgaagtgaaggcttttttctatcatctcttatagctctgactgaataagtcttaatgctttcttcatgttttctatcaataggggtaaatcccgaggcttatatgtgtacaatctgttagagtatcttccagctatgtcagctctaactgttaaagaagggtctacaaacatgattctaggcacatattgcccatcaggtgataaattcttatcagtggtttcatgcataaggtttagcatgatgaacttattctgagccatttcttgtatttcttcattttgggcaaatactttctttagtgcttgagagtattgacaatcctccaggtgatgaataaccattaatggcttcttacttttttgagcataaaagagaccttgctcataagtttgtacccaagagatggcatctacccatcctcttgagagtgactgagg

SEQ ID NO: 79 - DNA, 511 bp, Human
ttgaaagcctttacatttattgaagagcggacatatgtttgcaaatcacagtgtgcatgggcatgcattacatggttcataatgctattccaattaggcttttcatagtgccttctcataacgtcctttaaaaaaaataataactgaaagggaaaagaaagtgtcaattgcaattacatttacaaaaccaaactgctgctttcaattagagtgaatctgtgcttcgctactcagatatacacatgtagattttccaaggcccatgcacacacttctgtaggggcagaaattttctatgaataatggctttagcaacccgaatagtatctctaaacattgacaagcttggggaacagggcaacaagtgcaatgaacaatacaatttctaacgtttgtcccagtcaacataccactttgccctggagatatttaacacagcatttcatttttggaatgataagggataattcatctaattaagggtattatacagaatatacctataaaagac

SEQ ID NO: 80 - DNA, 987 bp, Human
gtgatgatcgacatttgaatctctttgccctttccaacggctatggcatcaggttctaaaataagctcgtaatttttcctgttattttaataatatggaaatattagcatagtgtttcttttgatagtgatagactataatccatatttaaattttatagagaagaaattttattgtactgtgatgtagatatttattatccaggtaaggatttgcccggtgtgtattttttacaattgagacattttactttaatctttaacaaaaaatgcattaaaaacacactcaaaaaaaaacaaaaaaaaaaaaaaaagacaacccaaacggggggggaaaaaagaggtgattggcaccctttatcacgaaaatcttcctgcgggcggccctctaataaccagtcttctggaacaactgtgcccaaaccgaggtgtcgctctttaaaataggcgtggtctcccaccatatctaacactcaaatggcgccgcctcttctcaaaagaacccacaaatatgtgtgccgaccaagagttaaaaaacccgccttgcgttggacggggcggacattatcttggattggcaccaacactattaaaagaggcgatgcgacacccaaccccgattaattggcagcagacagaaatcctttctcaactagtatagaaaactgttgtggccctccaccacacaaaaggacgaatcctacccaactaatgtattagctcctctccagtgtgaacaatatactaatctggatgcgcccacacccaagctggttagctaacacaaacaccagggagggaagacacacgcattttgtaacacaaatagatctaatattagactcgtgccgtataacatcggacactaatctctagcaccagcgggcgtcgactgtaattatgtcccgccactgctgctgttcgtcggcatgttatcatgccccacgctctctgtgatcctacacgagagggatcaccccacgcttat

SEQ ID NO: 81 - DNA, 483 bp, Human
ctgttcaaaaaaggttttatccaaaaaagttaatcaagacaagcaacagatactgcaaagcattatatacagcaccatagtccaggggccaaagaaatcaggaggggctgggcagtagaggaattccatatattaatgaatgtgagattaagtatagagtgaagacattaacacacaattctaatttctgttaggcagaatgctcccctaccctgatgccacagcctttcacgtttcctaaaccctagtaacctctgatctccatctgcctcatcaacacgtcaccaccctttgctcttcttccaattagtcacatgttggctgaatttatttcactccagtactttaggaccttgacagacaaatcgattacaaggtcaattcccaggatttcttcagggtgtgttcaggagtgcagatgttctttggatgacctttctactaaattagacctctgaaggagaaagctacttgccagaggct

SEQ ID NO: 82 - DNA, 552 bp, Human
tttttttaccacctagaaataaacattatattttcctctgatatgtaggtaagaacttcaaatataagacataatttaaaagtttataattgacatagtcagggattataaataatatcacacaaaataagctcttaatgcaagaaatgaatctccaggatagatcatactaatctatccaatccagccctctgttctgaaagcagcacatgaaaaggcagagaaagaaaaataatctctacgacctggcctgttaaacatgtatttatttcctgagtaactattaggtgctagctgtaatgggctattcagtggaggacagtggtcaaagcctcttatgatgtatggcagatgccagaaagatatgaaagatgtgatggtacaaaaaaggaagttggagtcacatccagccacaggactaactaagcctctttggggcaggagactttggaagtgttgaaggagagtagaatctattcagaaagaaacaactgggggcaggtccttccagtctgaatgaagattaactaggcgtaatgtaactggcatcat

SEQ ID NO: 83 - DNA, 505 bp, Human
gactgtagaaggaaagcattttattgcaaataactaatagttacaaaagcactttttaaatgttattattagatgttaagccgaaaatctagaaactaacatttacccaggttacaaaataagagcttcatatttttcaaagtctctaagggtaaggtacatccccagataaaatgagtataggccagtctcctttggctttgtggattctttccaaaaattttccagactatttagctttccttgtgtagttacagctcaaattagaaactgaagaaacagcaagtggccaggcagggtagaaagcaaataaactgagctacctgtgcctttttccaaatcagtatatgtgcttggctcctgaaaaaaaaaattctgatatgtaggcattctcattacttagtgagatattagtgaagacctttcaacgtataacacacagtaactgttgcatagttttaataaacacttgaattttccaggaatgtgactgctgtgtaaatca

SEQ ID NO: 84 - DNA, 671 bp, Human
gcggccgcggctgcggcggcagcagcactggctgggtctggctgcacagcaatggggctgatcatgtgctccactgtgtggattttgccatcttcaatcattttaggggctggagctgctggaaacatggaatactgagccccaatggcagggatggctactgtaccaggtttaatggcaactgggttgacggtagggatttccaaattcggcaccagttcatatcctttttcttgctgctttcctttcccttcatgatatcggctatatataccacggccagcagaatatcccccgaggtaggaacccctaggccctggggctctgttgccagctgcacctcgccctcggcctcttatgctgcctgctttcacaaagtagtccctgttgggcccaatgagcgcgttgtaggggtagccgtagtaggccagtgtgtaggggtcgcaggagtacacgtagctgggctgctgcgctgcctcagccgcgccgccgcccctggctgccttctggtagcgcgagtactgctccttgtccacgggcttggccagcgtgacctccaggcacgagccctccagctcagtgccggttgagttgttcatggcatgcacggcatcctcgcggctggtgaagtgcacggaggcgtaggtccggatcttcttgacgcgctccac

SEQ ID NO: 85 - DNA, 563 bp, Human
ttttttttttatatctgttataagctttttcttttttagaatttaagcttatgagtttatctacgcccactatattcataattacagttttatatctgcatacaaaagctatgtaaaaatccatttttcccaaatatacaaattttttttggatagtttaaaacattttgatcacagatttcaacagagttttaggctgaaaaaaatatcaccatctagcaatatcacttaacactgtttgcaaaacacaaatcttccaatgactgtaaatctttttctattctgtagtatttttctgattctcagggcatgaaaacattatgggaaaaaaaaggattttctacgaagaaagcatggagaactaatttggctctatggtcaaattaaaaatgccaagttaataagggagaaccaaaagaaagaagtggcataatgtcacatcagctcattcatgccctgataatttctgtatcaacaatacatatgtaaagtgtctccttttgtcttacattgtgctccataatttacatgagtattatctgcatcctgaggaggacagattt

SEQ ID NO: 86 - DNA, 545 bp, Human
ttattagggattcctgccaccttattaacatataaaacaatctggatgttgacatagaaatgcaaatttcactatacaaaggtaaggctccaagcacagtaacatggcccccatatctttagtatttcaatgaaataaacttattggggattcaccccgagttgtgtttataaatattagacaaaccacaaaatatattccaaatacataacattttacaatatttttcaagcacagacaaatacatactttactttacctacattgttttcatgatccaacttgcattagcactaaaggcaatattgtgtgtgtatatgtatttgccatatgtgtgtgtgtattatatatatttatttatatccacaaatgtacactcagtggcatttatggaaaatttaaccctttcaggctgtgggttttacccaccatagtatctgagagggagaagaaccaataatacatctcaaattcctcaattagggcaaaataagcacaattatgcatgaggggcatatatgttgtgtctattcaaagacacacat

SEQ ID NO: 87 - DNA, 464 bp, Human
  misc_feature (28)..(28): n is a, c, g, or t
  misc_feature (276)..(276): n is a, c, g, or t
  misc_feature (422)..(422): n is a, c, g, or t
  misc_feature (463)..(463): n is a, c, g, or t
gcagcgtttgtccctgggcatgtgatgnggagtcctgggcacatcgagatgctttacttctttctttcgacctcttaaaaaactaaaccaagccaaaccacaaaggaaatctgcacaacttaagagaaacttgaaagggatcgtgtaactactagtttgtactaagtttttttcaagaaagggaaacaaatttatatatatatatatatatatatatatgtgcaatatatttttacactgtgtgattaacattagggagtactgagtgcatcactntatcagtgtgacgggtgatgtccacgtcatggctgttctgactctgaaagccacttctgctgatgtctaaaccgcactcaccgcggacgtccggggttgtggtggccctgctgtgcctcctgcaggtgagaggtgtggtgttgccngttggacttgctgttgagcctggttgcaaacctgtagtgana

SEQ ID NO: 88 - DNA, 611 bp, Human
tttgctaaaaatttaccaaaatagtttgaacacataaaaatatttttaaaaaaacagaaccaaaaacccagcataaatttagttgtataggcattggttagaggacactgttttcactaaggattatattcaacaactttctcttgagttgttactaaaattctgattctgaaccttatagcttataatggtgccaactattagaaatgggaaaatctaattcagtccaatgtaacatgtattatgatataatagatgaagggtatgtctacactataataaaaaataaacatatttttggttatttaaagaccatcttcctaacctgtaactaaaataactgtatttgatttaaacttatttaagtgcagtgaattatggaaagctaacttaaaggtttgaataatcaattatgagtaaggaacacctgttgacagccccgtgacccttcagaaccaggcatttgctgaaaaaaagaaatcactagcattgaatatagcccttagtcacgtgagagattaacttcatgagcaacccagcatgtagaggatgaggtggactttcccagccacccactccttgaggggacagtagtattcatagtgaaactg

SEQ ID NO: 89 - DNA, 515 bp, Human
tttaacagtaaaatttatttttatttttgcatattctcaaatacacatttacaatagtatcacacttcctatatgaattcttcatagttattttaagtattttacaatttgtacagaggaagggacatacaatatctaataggctatttttcaaccaaataataatttatgtccttgtaagattttgtacctctttaaaactttcaacttcaacatccacttttttagctttgctaatcaaattaagaattaaaaccagcctgcaaataataacagtatataacattaagcacaatttcatttctttctttatacaaatgttctatatttacttgaccaaatgcttaattaccttttaaaggtttcaataccgtggttaaaaacaaaacaactgtgtatacctccagactatatgaaaaatatgaaatatgtaaagtgtcacgttttttaccttagtttatttttaaaagataaatagctaactatctgtattaattttaaagaatgttttaaaa

SEQ ID NO: 90 - DNA, 535 bp, Human
  misc_feature (422)..(422): n is a, c, g, or t
  misc_feature (424)..(424): n is a, c, g, or t
gaattctccttaatagttatgtgcaaacaggatgctcgaccctaagtgaattttagtgcagcctcaggccaatcttggtcctgggagtgggcagggttcccagaagaacgagtctggtttctgaggctgtagaagggagccggaagcccctcaacttgatcacggtgagaacacagggagcctttggagaagctattcagccactgtagttaagagctcctgttctgatccagggagacctgggttcaagtcctgactcagccacttcctagttgtgtgagtttcagaaaaaaaatcacttcacctcttagaacgcaatttcagcttctgtaacaatctctaggttaggagggagtggggcgggtgagggcggggaggggagaggaaaaaaaaacacaacaatctctatgtggtttaagggnangggggttaaatgagatgatcatgacaatgcctatagaagtgctgggagtatgaaagctggaacagccctgtgagctttgtgtcgttgtccgatttttgataagggcaaata

SEQ ID NO: 91 - DNA, 535 bp, Human
  misc_feature (97)..(97): n is a, c, g, or t
  misc_feature (322)..(322): n is a, c, g, or t
tttttttttttttttttacaatttaaacaagaggattcactggtttgaaaaaaaggtttgaaaatcaggaaagctaaacaaaagtcattttacatantggagaaactgagacccatatgtgtaaatggcttcccaaggtcacagtggtgtcagtggcagagctggtactgtaccaggctgcctggatcatagactgatgtttttgccaagaccagccgaaatgttcctctcaggaggtggcaggtgggggtggagtgccaggaaggcactgtccaaagaagtgggttaaggtcacagcctcccggctcccaaggaccccctngagaacagttgctttggaaaggtcactcagatgtgaaccagaggcttgaggttttggagtggaaaggggcagggtaaggaagaatagagtaggaggagggcgggggacagggattcatcctccaggttcctcacacccccactgggagcagcgcccccaccccaagcacctgatttcaaagtctcccctccactgaagggaggggcaaaggga

SEQ ID NO: 92 - DNA, 548 bp, Human
accttcttaactatgagattattacaaatatatttttacaaatacaaaaaactgaagtacagagaggctaagttaatttctccaaggtcccacagcaagtaactgcagaagggcaaagcaaaaataggacaacacatgtaggcaataccaagcagttcttgtggcagcaactggaaaccttttggagacaccattctgcatttcgttgtagtcatacacaaaaccctagttatgtatccatgcttctttctcataatgccaaagtggcactattctaatttactaacaaggttttctaaaaactacccaaattattgaggtgtttttgctcacttcttcccattagaataaatgtagacaataagaaacgcatgagggatgacatagtcctccatcaaatctgtcctttcacacaagagatggcatggtgtagtgtagcagaatcatgagctgccaggaaattatgaattctgattcctccagctgagtctttgaaaaagtccagatgagaaacacttccatcctgatgctgaagcaaggagaatgtc

SEQ ID NO: 93 - DNA, 481 bp, Human
tttacattgttattaccactttatttatttcctgatatcgactagataattacatgtcccatcactctcccacatgggccatacaatggcttgagctgcatcattttgtaaattcctcaagcttctctactggtacacatattaccctagcctatgtttctgagatgccttagtgaaagttgattttctttctatgtcttctcagggaaaacgacttctgctttcacacttactggagatgggagatgagtggcactggcaattcacaccctgaaccttcagcttcacaacaaaatcgtttgtgaggccaaaggaatcaagacagcagagctcaaagcagggccagaaggtgcaggggggaccacattggcgggtctcgctcagggacacgatggcgtcattgtaacagcactgctccaaggggttgtagatcttgtctccacacctgggtgccggctggcacagccatggttctgagcca

SEQ ID NO: 94 - DNA, 4021 bp, Human
taacgaacgtgtgagagatctacttcggcggaagtcatctaaaaccttcaatttgagagtccgtgagcatcccaaagaaggcccttatgttgaggatttatccaaacatttagtacagaattatggtgacgtagaagaacttatggatgcgggcaatatcaaccggaccaccgcagcgactgggatgaacgacgtcagtagcaggtctcatgccatcttcaccatcaagttcactcaggctaaatttgattctgaaatgccatgtgaaaccgtcagtaagatccacttggttgatcttgccggaagtgagcgtgcagatgccaccggagccaccggggttaggctaaaggaagggggaaatattaacaagtcccttgtgactctggggaacgtcatttctgccttagctgatttatctcaggatgctgcaaatactcttgcaaagaagaagcaagttttcgtgccttacagggattctgtgttgacttggttgttaaaagatagccttggaggaaactctaaaactatcatgattgccaccatttcacctgctgatgtcaattatggagaaaccctaagtactcttcgctatgcaaatagagccaaaaacatcatcaacaagcctaccattaatgaggatgccaacgtcaaacttatccgtgagctgcgagctgaaatagccagactgaaaacgctgcttgctcaagggaatcagattgccctcttagactcccccacagctttaagtatggaggaaaaacttcagcagaatgaagcaagagttcaagaattgaccaaggaatggacaaataagtggaatgaaacccaaaatattttgaaagaacaaactctagccctcaggaaagaagggattggagttgttttggattctgaactgcctcatttgattggcatcgatgatgaccttttgagtactggaatcatcttatatcatttaaaggaaggtcagacatacgttggtagagacgatgcttccacggagcaagatattgttcttcatggccttgacttggagagtgagcattgcatctttgaaaatatcggggggacagtgactctgatacccctgagtgggtcccagtgctctgtgaatggtgttcagatcgtggaggccacacatctaaatcaaggtgctgtgattctcttgggaagaaccaatatgtttcgctttaaccatccaaaggaagccgccaagctcagggagaagaggaagagtggccttctgtcctccttcagcttgtccatgaccgacctctcgaagtcccgtgagaacctgtctgcagtcatgttgtataaccccggacttgaatttgagaggcaacagcgtgaagaacttgaaaaattagaaagtaaaaggaaactcatagaagaaatggaggaaaagcagaaatcagacaaggctgaactggagcggatgcagcaggaggtggagacccagcgcaaggagacagaaatcgtgcagctccagattcgcaagcaggaggagagcctcaaacgccgcagcttccacatcgagaacaagctaaaggatttacttgcggagaaggaaaaatttgaagaggagaggctgagggaacagcaggaaatcgagctgcagaagaagagacaagaagaagagacctttctccgcgtccaagaagaactccaacgactcaaagaactcaacaacaacgagaaggctgagaagtttcagatatttcaagaactggaccagctccaaaaggaaaaagatgaacagtatgccaagcttgaactggaaaaaaagagactagaggagcaggagaaggagcaggtcatgctcgtggcccatctggaagagcagctccgagagaagcaggagatgatccagctcctgcggcgtggggaggtacagtgggtggaagaggagaagagggacctggaaggcattcgggaatccctcctgcgggtgaaggaggctcgtgccggaggggatgaagatggcgaggagttagaaaaggctcaactgcgtttcttcgaattcaagagaaggcagcttgtcaagctagtgaacttggagaaggacctggttcagcagaaagacatcctgaaaaaagaagtccaagaagaacaggagatcctagagtgtttaaaatgtgaacatgacaaagaatctagattgttggaaaaacatgatgagagtgtcacagatgtcacggaagtgcctcaagatttcgagaaaataaagccagtggagtacaggctgcaatataaagaacgccagctacagtacctcctgcagaatcacttgccaactctgttggaagaaaagcagagagcatttgaaattcttgacagaggccctctcagcttagacaacactctttatcaagtagaaaaggaaatggaagaaaaagaagaacagcttgcacagtaccaggccaatgcaaaccagctgcaaaagctccaagccacctttgaattcactgccaacattgcacgtcaggaggaaaaagtgaggaaaaaggaaaaggagattttggagtccagagagaagcagcagagagaggcgctggagcgggccctggccaggctggagaggagacattctgcgctgcagaggcactccaccctgggcacggagattgaagagcagaggcagaaacttgccagtctgaacagtggcagcagagagcagtcagggctccaggctagcctggaggctgagcaggaagccctggagaaggaccaggagaggttagaatatgaaatccagcagctgaaacagaagatttatgaggtcgatggtgttcaaaaagatcatcatgggaccctggaagggaaggtggcttcttccagcttgccagtcagtgctgaaaaatcacacctggttcccctcatggatgccaggatcaatgcttacattgaagaagaagtccaaagacgccttcaggatttgcatcgtgtgattagtgaaggctgcagtacatctgcagacacgatgaaggataatgagaaacttcacaatggcaccattcaacgtaaactaaaatatgagctgtgtcgtgacctcctgtgtgtcctgatgccagagcctgatgccgctgcctgcgctaatcatcccttgctccagcaagatctggttcagctttctcttgattggaaaacagaaatccctgatttagttttgccaaatggagttcaggtgtcatccaaattccagactaccttggttgacatgatttactttcttcatggaaatatggaagtcaatgtcccttccctggcagaagttcagttactgctctacacaacagtgaaagtcatgggtgactctggccatgaccagtgccagtcgctagtccttctgaacacccacattgcactggtgaaggaagactgtgttttttatccacgcattcgatctcgaaacatacctcctccgggtgcacaatttgatgtgatcaaatgccatgctttaagtgaattcaggtgtgttgttgttccagaaaagaaaaatgtgtcaacagtagaactagtcttcttacagaaactcaaaccttcagtgggttccagaaatagtccacctgagcaccttcaggaagccccaaatgtccagttgttcaccaccccattgtatcttcaaggcagtcagaatgtcgcacctgaggtctggaaacttactttcaattctcaagatgaggctctttggctaatctcacatttgacaagactctaaggaggagacttttaaagatgcactacatgttttttgagatcattaataaaataagcattgtgaaaacagtcaaggcaatatgaatatctccgtgtagctaattgaattggaactggaaaaatgcagacctctaaaattgaaaatgtaactattttaaatatctacaataaaataaaaacagctaatagcagagccccaatgaaatatctttatcatcaccttgcttcattttcttgaaactcaggcttgtaaatttgtgcctgcttcattatttgtgaggtgattaaagcatttctgattgtt

SEQ ID NO: 95 - DNA, 2917 bp, Human
tgtcagtaccacacctgttacgaggtttcctgagagtagcaccccttccataccatctgtttacaccagcatgtctatgaccactgcctctgaaggcagttcatctcctacaactcttgaaggcaccaccaccatgcctatgtcaactacgagtgaaagaagcactttattgacaactgtcctcatcagccctatatctgtgatgagtccttctgaggccagcacactttcaacacctcctggtgataccagcacacctttgctcacctctaccaaagccggttcattctccatacctgctgaagtcactaccatacgtatttcaattaccagtgaaagaagcactccattaacaactctccttgtcagcaccacacttccaactagctttcctggggccagcatagcttcgacacctcctcttgacacaagcacaacttttaccccttctactgacactgcctcaactcccacaattcctgtagccaccaccatatctgtatcagtgatcacagaaggaagcacacctgggacaaccatttttattcccagcactcctgtcaccagttctactggtgatgtctttcctgcaacaactggtgctgtatctacccctgtgataacttccactgaactaaacacaccatcaacctccagtagtagtaccaccacatctttttcaactactaaggaatttacaacacccgcaatgactactgcagctcccctcacatatgtgaccatgtctactgcccccagcacacccagaacaaccagcagaggctgcactacttctgcatcaacgctttctgcaaccagtacacctcacacctctacttctgtcaccacccgtcctgtgaccccttcatcagaatccagcaggccgtcaacaattacttctcacaccatcccacctacatttcctcctgctcactccagtacacctccaacaacctctgcctcctccacgactgtgaaccctgaggctgtcaccaccatgaccaccaggacaaaacccagcacacggaccacttccttccccacggtgaccaccaccgctgtccccacgaatactacaattaagagcaaccccacctcaactcctactgtgccaagaaccacaacatgctttggagatgggtgccagaatacggcctctcgctgcaagaatggaggcacctgggatgggctcaagtgccagtgtcccaacctctattatggggagttgtgtgaggaggtggtcagcagcattgacatagggccaccggagactatctctgcccaaatggaactgactgtgacagtgaccagtgtgaagttcaccgaagagctaaaaaaccactcttcccaggaattccaggagttcaaacagacattcacggaacagatgaatattgtgtattccgggatccctgagtatgtcggggtgaacatcacaaagctacgtcttggcagtgtggtggtggagcatgacgtcctcctaagaaccaagtacacaccagaatacaagacagtattggacaatgccaccgaagtagtgaaagggaaaatcacaaaagtgaccacacagcaaataatgattaatgatatttgctcagacatgatgtgtttcaacaccactggcacccaagtgcaaaacattacggtgacccagtacgaccctgaagaggactgccggaagatggccaaggaatatggagactacttcgtagtggagtaccgggaccagaagccatactgcatcagcccctgtgagcctggcttcagtgtctccaagaactgtagcctcggcaagtgccagatgtctctaagtggacctcagtgcctctgcgtgaccacggaaactcactggtacagtggggagacctgtaaccagggcacccagaagagtctggtgtacggcctcgtgggggcaggggtcgtgctgatgctgatcatcctggtagctctcctgatgctcgttttccgctccaagagagaggtgaaacggcaaaagtacagattgtctcagttatacaagtggcaagaagaggacagtggaccagctcctgggaccttccaaaacattggctttgacatctgccaagatgatgattccatccacctggagtccatctatagtaatttccagccctccttgagacacatagaccctgaaacaaagatccgaattcagaggcctcaggtaatgacgacatcattttaaggcatggagctgagaagtctgggagtgaggagatcccagtccggctaagcttggtggagcattttcccattgagagccttccatgggaactcaatgttcccattgtaagtacaggaaacaagccccgtacttaccaaggagaaagaggagagacagcagtgctgggagattctcaaatagaaacccgtggacgctccaatgggcttgtcatgatatcaggctaggctttcctgctcatttttcaaagacgctccagatttgagggtactctgactgtaacatctatcaccccattgatcgccaggattgatttggttgatctggctgagcaggcgggtgtccccgtcctccctcactgccccatatgtgtccctcctaaagctgcatgctcagttgaagaggacgagaggacgaccttctctgatagaggaggaccacgcttcagtcaaaggcatacaagtatctatctggacttccctgctggcacttccaaacaagctcagagatgttcctcccctcatctgcccgggttcagtaccatggacagcgccctcgacccgctgtttacaaccatgaccccttggacactggactgcatgcactttacatatcacaaaatgctctcataagaattattgcataccatcttcatgaaaaacacctgtatttaaatatagggcatttaccttttggtaaagaaaaaaaaaaaaa

SEQ ID NO: 96 - DNA, 138251 bp, Human
gatcaaaagatgctcatcaaaagctctgagctttcctgagtgctaacaggaaacatccagcatcactggtctctccaaggctgcaggtgtctttgcccatagtgcctgttttgtgtcagggaaagaatcaacctgggagccaagcccaggaatcaggatgaccaagacatactggacaaggaaggaacaaacccatccaaggacactcaaggacaaatcaagcaaatgaatttaagggagacctgctcatggtctgctttgctgctcagcatggctgggaggcacagtggaagatcatgcatccttcccctgggactcctctgccagagcctgagagctttctcctgcacacaggctaggggtagggcagttggaattgatccatgccttctagctagactgtgggtcccctcagtcttgggcatggtgacagcccagcatcagacagaggtcagtatcaaactagaaaatttaataaatgctgtcagatttgtagacccaagaaaatataaactgccaatcacggaggaaaaaaatctctcaatgatcttatctttatatgattcccttgctgcctggagattgacatttccttggggataatctggtcataggattggtgaaggtggaagggaggcaacctccgaaggtggggccctctgctcacctgggacagggggggcctgaggtaggtgtctgtgtgggctgggcaggaggatgggagcagtgcttctagatgtttccactttctcctcattagataataatgaatgggtgatttccctagtcactgcagtgtgaggaaatctacaaaattaatttcacaatacactttacaggataggtggagaaacacatgaagcacaactgcagtgggttataaaaaatggcctttcgagttgagcagtaaattcgttcaagcagccattctgaaggacaaactggctctgtatttaacaggggcattccagcacttctctagctactgggttgacaatgactcaccaaagcctctggtagccaccacaggacgcccagagcacgttttaaagctgaacaccaaactgcggacttcgggagtaagtgaactgactggtttttattttgttttactgcttttaacattacagtgactgttacaggttccagcaggataactgggtggaaatgagtttggtttcacttagtctctctaaagagaaagcaagttggtagactaatacctaataaaagcaaagctgccaacaattgaaattgcctgggctgctctgtgtgtcccacatgcatgggtgtgggtgccagtgtgtgtgcgtgtgtgcatgcatgtgcatgtgtgttgggatagagtggcaagaaaatgggaaataataagaatgttcagtccatagcccttcattataaaaaggtgagctgtaataaatactagtgccacatttagccaaaactttactccagccaaaggtgatattttcatgataacatcctgtgattgctttgttcttcgtcttttatgttcttcctagatgggctcagaacatacaagaattaagtacacatcttattttccagtgataatgctaccggcaaattctgttgtttgtataaacatcagccatgtttatataactaaactagtgttttgttttgtcaattcagcaagaaattagaccacatggtggcttaatgctgcattgatttggctatcaatttgttttcacttttctgcaaaatatttaatacattattaaattgaattatgctgatgccacagttgttcttatctcaattgtcttaaaattcatttaatttttttttcctttcgtttcattattcaaattttaacttcagttctcaacattttatctgatggaagagatggagtccattactaaggactccattgtgctccatcatgccagagttgtaaaatagatcttttaaaggaaatttactgtgatttttttctatttaagagcttcctctccagttgagcatgtaagaaaattataccaggagaatacagtaaactctatgaggcaagctataaacatgtaggattgtgattagggctggttctccttctagagacatggtaggattgcaatttcataccatccttgaagttagagagagccacttgactcatttagccaatgaactgtgagcagaatgacatgtcacttccagcagaagctttaagaatctgagagacattcatacgttttccatgtgctgtagccttatacccaaagcctgggtcccaagtgaccatgacaggcagagctccctgttgagccacagagatttagagaatggctgttaacacagcataatccagcccatcctgactaatctgatattaacatgtataataaagaattctatcaatgctgagggaagatgattagttaaggtcctaggttgcaagtctcaaaacctcttctaaggattgtagacaggaaattaaatgacttctagtccctagagttcccaatctcctaccatcccatcctaatatgacagaagtaattcctgagttgcttctgaaaccagagcttccctcagaacccttagcctgccagatggcttcttggagagccctcactcacttttctccttctgctattgctgctcattcattccagcttttaaaaattcatctttatccaggaacctcgcttctagaaaagtcatacaggtgcttccaggaggctacatgggcacccatatttttctagccactttcattagaccaatgcagcagagaagaaaagcctcaataattattatgacatggcatgttaggataccaagtaaattgcatttgtaaaatgtgattttctgttggtgttcacttcggctctactgacatttggtaagtattattgactgactgactaactaatgtggtcattagtcttcataaagaaaggctctctacaaaaacggagggatgccctttttctggcatttaatacgtaagaaattgcctccgatagaaaccagagttgcctgattactatcagcacaggagaaatgtattaatgtgcctttctagtaacaggtttttagaaagtcaaatataaacaaatctgtctatttgtgtgtgtgcatgtggtagtggggagggaagaaaaaaggagggggagagaaagagaaataagaaccaagtttattatactgtattcagggggaaaacattttcccaaggttctaacagaagagcaaagtgccactgtcaatagcctcagtagtgttagggttgcttttatgtatttatttatttacttatttatttatttttcctttttttttcctttctctttttttcttcttttttttttttttggacagagtctcacactgtcgcctgggctggagtgcattggcgcaatcttgactcactgcaacttctgcctcccaggttcaagtgattctcctgcctcagccgcccaagtagctgggattacaggtgtctgccaccgtgcctagataatttttttatatttttagtagagatgaggtttcactatgttggccacgctggtctcaaactcctgacctcatgatccacccacgttggcctcccaaagtgctgggattacaggcgtgagccaccgcccctggccaggattgcttttatagccagtcttcaggtgcccactgtaggaacaatgtcatttagccctcgggattattctgtgccaaatatggataatgactaatattcaacacagatattctcagctcagaagagcaattagcaaattcataaattaagtgcttgcttcctttttagtcaaatacaaacatttgttaaaagatattattttgctttacactttttctctcagaaataaacagatgcttgaattcccacagtgctgcttgagcctcacaccatgtcatcctgccaggcacccagatccagttctagagtttcacatgatcatgagtgttggttaataagtcactgtgaactgggaggggagatttttcaggagtgccacagggctctccctttaatcacatacactccctgctttcattggaaagtgtataatgatgtcagagtgccccagaatggagctagttggaagactgccgtcatagggatgccttagtgaattaatcaggttttaatttctggctctcaactttgtagatgtaaaagttgatttatcaatatgtgagaaaggatgaatctttctgaaggttatgtcatcacactcactaagcacacagagaataatgtctagaatctgagtgccatgttatcaaattatactgagactcttgcagtcacacgggctgacatgtaagcatcgcctgcctagtacagactctccctgcagatgaaattatatgggatgctaaattataatcagaacaatgtttggtgagccaaaactacaacaagggaagctaattggatgaatttataaaaatatacctcagccaaaatagcttaattcagtctcccttatcataaggatactcttgcctaaagggacagtaatattaaagacactaggaataacctctgtactttggacagtagacctgcatagcccattaggcctcaatgaagtcttatgcaagaccagaagccaatttgccattttaaggtgattctccatgtttctgctctaactgtgcttcacaatactcaagacactgaatcaggatgtttcctggagtgcagggagctgtccgtgttactgagcagttctcagcaacacaaagatcctactgactcctcatcagacttctttctcactggaattttacacctgggctgttaacaccaggccaggtcaaattcaaaggagagaaaaaagctcattatgaagggtaaaatccaaaacactgtgcataaagatatgtgtgcacaatttttatacataaagatttcataaagccaaagcatcaggaaatgaaaagagatacagaaagaaaaatgatggtaaatgagacattaatttacccttctaatctctatcacagcaaaaaggtaattaaaaaatctatatgaggaccaaaaaatacacaaagactatgtagcaaagcctatagcctgaaaaagtaaacattgaaatttgtatgtccataaaatgtttacaaaattcagtacatattacacaccccaccctaaaaacatctaagcaaagtagagaatgtagaaatgctacagattatattctctgattatgacacaacaaaactagaaattacagcatggaaatttaaaagctttctcttaaataattctatgtcaaaaagaaatccaggccgggtacagtggctcatgcctgtaattccagtactttgggaggccaaggtgggcaggtcacttgaggtcaggagttcaagaccagcctcgtcaacatggcgacaccctgtctctactaaaaatacaaaaattagctgggcctggtggcgcatgcctgtaatcccagctacttaggaggctgaggcaggagaattccttgaacccagaaggtggaggttgcagtgagctgagattgcaccactgcactccagcctaggtgacacagcaagactctgtcaaaaaaaaaaaaaaaagaaatccaaataaaatttccagaatatgtggaaaatagtgccaataaaaatattacacatgtgtaatcccagcattttgagatgccaaggtggcaggatcacttgagaccaggagttcgcaaccagcctggacaacatagggagactccatctccacacacgccaaaaaaaaattttaaatagccaggtatagtggtacttcttgtaatcccatctacttgggaggctaaggtgggagaatcacccaacctcaggagttcagggcttcagcaagccatgatcatatcactgcactccagcctcagcaacagagcaagatcctatctcaaaaaaaaaaaaaaaatcacatgtgggaaatagctatagcacaataaaaataaatgtattaagtatgaacaacaaaaaagctagtaaaggttgaacaacaactatccttaggaaagtggaaataatgtgttaataaatatgaaagcaggctaggcacggtgactcacatctgtaatcccagcactttgggaggctgaggcaggcagatcacctgaggtcaggagttccagaccagcctggccaacatggtgaaatcttgtctctcctacaaatacaaaaactagccaggcttggttgcgcactcctgtaattccagctacttgggaggctgaggcaggagaatctcttgaacctgagaggcagaggttgcagtgagccaagatcatgccactgcactccaactggggcaacagagtgacactccatctcaaaataaataaataagaaagcagaaactaataaattagaaaacagaaacatagaactaatttataaatcaaagcactatgccttgaaaagagggagaaaaattgtgaattaaggaagggaagagatggttggagaggaggtgggagaaggcagagataattgaaggagcaaaagcatctggagaagcaaagccactgaaagatgaacagggctctgaaagaaatgcttgattgctatcttttcaaatgactgcagttcccagtgacatcatttttctcctccctggaagtctgaggggcagttcacttatctactcccctcccctactcctcaccccacactcaaaacctgtctatgctcctttcattctcatatgacagatttcagatggcattcttatttccctgatttctttttgagatagcttgcatttccctactctatataaagccaccgtttatcaaatgcctacatggaccaagcagtccacaagggcttcacagacagttttactaaactcatgccaaaactttcaggttttatagataaagatctataccttatagataaaggtatctataaggtatagataaaggtaaggtatctataccttatagataaagaaattgaagcttatagagtttaagtaatgttcccaaagcctcgtggctagtaattcaaacctaatttctgcctactccaaagtctatttttcctcatgatactatactgcctctccatggataaagacagagatcacatattaataaaatttgcacaaagtcggcaaattgttgaaagggaaggctaagatgactaataaaatcaagagccagatgatctcaacaacctgaaataactggctgacaaccaatttgaataactccctgcgggtgaagttcaaagtactatttggggtttttttttaagtttggctgggtgcagcggctcacgcctgtaatccaagcacttagggaagccaaggtgggtggatcatgaagtcaggagttgaagaccagcccggtcaacatggtgaaaccccatctctactaaaaataaaaaattagccgggcctgctggtggatgcctgtagtcccagctacgcgggaggctaaggcaggagaatcgcttgaacccaggaggtggaggttgcagggagccgagatcgcaccactgcactccagcctgggtgacagggcgagattccgtctcaaaaaataaaataaaataaaataaaaaataaaagtttgatatattcagaatcagggaggtctgttgggtgcagttcatttgaaaaattcctcagcattttagtgatctgtatggtccctctatccgtcagggtcctagcaggaaattgttgcactctcaaaggattaagcagaaagagtttaatgaagggtctctttccagggttaagggaactgctagggtttggatatttgaccactccaaactcatgttgaaatgtgatccccattgttggaggtgggacctaatgggaggtgttttggtcctgagtgtggacctctcacgaatgtcttggtgccatccaagtgagatcttgctcgctctttttttctttttgagatgtagtttcactcttgctgcccaggttggaatgtagtggtgcgatcttggctcactgcaacatccacctcacgggttcaacccattctcctgtgtcagcctccagagtagctaggattacaggtacccaccactatgcccagctaatttttggtatttttagtagagacggggtttcaccatgttggccaggctggtctcaaactcctgacctcaggtgatccacctgcctcggcctcccaaagtgctgggattacaggcgtaagccaccgtgcctacctagttctagctctcttaattcccacaagagctggttgttaacaagagcctggtacaaacccctctctcttgccacgtgatctctgcacatgccagcttcccttccccttctgccatgagtggaaacagactaaagccctcaccagaagcaaatggtggcaccatccttcttgcacaccttcagaactgtgaaccaaataaacctctcttctttaaaattattcagcctctggtattcctttataacaacacacacacacacacacacacacacacacacacgcaaaagcagactaaaacaggaactaattagaaatggtgatgcaccgagggattggcaccgaggctccccaacaggaactgaggccatggatagaaggacacattcatgttatttttttctaatggttaagtaattatttgctcttactctcaaaatttctgccaaggcctcccatggaccaaactcaactagaatctaggaagcagagaacctgagtgttgcattcagcagaagtcagcttcctagggaatattgcaggaagggtgaaggtagagaatctggtggggaagcaagcaaatgcccatcacatgcactttcctccaacagagcgactcagatgctataaaacttgctaacgcagtctcagggtctgatcacagtaacatacaatccaggttttaatcatcagaaatcgcagtcctattgtcttctgcacagacccaaacacacttggaggtcatgttcaatatgaatacctcacagagaaggaaatttacacacgagaagtacatctgcagaaagccagctggcatgtcaaccattcgaaaactcaggatgttcgggataaagaagactcaggaagacaagtatgaagcataatctgtgacattattgatatcttcctgatatcaataatattgatatcttcctgatatcaatattattgatatcttcctgaagaacataattcctgcctaccatcaacaagcatcaatactttctaccagctattctcaaccctcatcatcggaagagacagacactgactgtgtcaaagtattagtcccatcattcagcaattaactttagctcaatgcttcaaaaattcttcaggccctgtgtaatttcagctatgtacattaatgatgagtacccatacaaccattctgtttcttattttcagtaccatatttaataaatatcagttattcaatactttatttagacattttgttagattgttttgaccaatgaagtctaatctaaatgttctgagcatgttcaaagtaagctaggctaacctataatttttggtgtgctaaatgcatttttaacttatgatattttcagtttacgggggtttgttgggacataacttcatcatacatcaaggagcatctgtatatgggatatagttaaagcagtgatcagaggaaaatctatagccttaacacatttattaataaaagtgtaggaattaaattatcagctgaaaaatgtaaaaagtatctaaaagagtaagcagaaagtacaagaaagaacccatagtagaaaaaagtgaaaattaataaaataagaagccaaaaaacagatcaaatcagtaaaccaaaaatcttgttctttaaacaaatcaacaaagttgacaaaaaattagatcttttaatcatgaataaaaaaagagaaagcacaaaaatgaataaggaatggtgagagaaataactattgataatcagcaaataaaaaatcattaaaaacaatgttgttcacatctatgaaaaacattgaaagctagagggaatgggtaattttccagaaaaatacaattcaccacaattgacttcaaaaaaaaaaaaaaagaagtacagcacttatgtgagcaatttccatagagaaatacagttgtcatggaattataacacacacacaaacactaggtttagatgttttcacagagaattccaccaaacctttagaaatcagatcatccaaaggcaaattaacaaccctcagccatttgaggcaaaatattacaattgaggcaagatatactgtactgaaaacttgaggaaaaagcaggagagaaagttcctttgggaaattcgaatactcaaaagtgcttacatacaatgaaaaatttggaaatccataagcatggccaaggtgggacacatgctcagaaaaggcctgagaagacactaataactcacctttagtaattcctaggctcacagcaagaaaaaatgaaggctaaggcagaattatatatggctccactaagtgttgagggagccccaatacagagtcagtaagcaaagtctgggagatgtttttcatatttttttcttttttggctccttgcagtcaaggaaatcatttttaaatcactaaatgctaaatgaacacaagctaaaggaaccgagccgccttcaaacatcaaacataaaaaagaatgcagatattacaaaaccagtttacaaaagttactaaacaaataaaaactacatcccacagtgggtaacaaaaataaccttgaagaagggaaaaatttggtttccagaataaacacattataatatccaaaatgcccagttttcaacaaaaattaagaagcatgcaaataaacacaaaactatggcccatttacagaagaaataaatgagactctccctgagtaagcagatattggaaatattcgacaaaaactttatataactgtcttaaataaacttaaagagctaaagaaacccaagagaatgacatataaataaataagaaatatgaattttttaaaaggtacaaaaaaattctgaggctgaaaagtacaataactaattaaaaagttactttttacttagggttccaatagaagatttgagcagctggaaaaaagaatcagtgaacttgatagatcaagtgaaatgattcagtctgaagagcaggaaaatgaaagaatgacaacaaaaaagaatagagcctaaagacctgtgtaacaacatcaagaatgcctacatacagaatcctggtggggagtgaggggcaggaagactatttgaagaaatgtgtttgaaagcttcccaaatttcactaaaaacaaatatatacattcaaaaagctcagtgcacttcatcaaggaaatatacaaagatattcacaccaagacacactatgtttcaaattgtcaaaaggcaaagcgaatgtttgaaagcagcaagagaaaggcaacgcgtcatttacaaaggatcctcaataagtttgacagcagatagtgcattataatccatggatgccagaagagcttaggaaaaaggcaatgcatcatttacaaaggatcctcagtaagtttgacagcagagagctcattataaaccatgggtgccagaagagcttagaatgacattttaaagttctgaaagaaaaaaacactgtcaaccaaaaattctgtaacttggaagatgccccttcaagtattaaggataaattacacattcccagattaaaaaaaaaagagagagagaaagagaaagaaagaaagaagagagagaaagaaagggagagaaagaaaaagaaagaaagaaagaaagaaaaagaaagaaagaaagaaagaaagaaagaaagaaagaaagaaaaagaaagaaaagaaagaaagaaaagcaagcaagctttaaaagttcatgtttggtaggctgtacttcaagatacacttttaaaaaaaaagactccttcagatacaaactaaaaaacactagaaagtaactcaaaaccacataaagaaataactccagtaaggataactacataggtaaatataaaagcaattatcatattttttgtaagtctttttaaatattctatatgttttaaaacaaatgtgtaaaataatgactataaatctatgttaatgaagcatgatgtataaagatgtggtttgtgaaattaccaacataaagaaattcataggaaactaaataataatagagattttgtatactattgaagttgtttcaatttattctaaattgttccaaattaagaatgttaattgtaaatccccatggtaaccactaagttaatatcttttgaaaatacagaaaaggaaagcagagggtaaacacagtgatatgctacaaaatagcaactaaacacaaaagaaggcgataattgaggaaattaggaacaaaggaggtataagacatacagaaaacaaaagcaaaatggtaggagtaagcccctctttatcagtaattacattaaatacaaatgaattaaactctccaatccaaagaaacagattgacagaatggatttttaaaaaatgatccaactatattgtccaccagatactcactttagatcaaaatacacaatgagttgaaatgaaaggatgggagaaaatattccatgtaagtaataaccaaaggagatctgaggcaaatatacttatatcagacaaaatagactttaagtcaaaaactgttacaaaatacaaagaacagtatatattgatttcaaaattaaacaagaagatataacaattataaatatatgtacaccaactaacagggctccaaaatatataatgtaaccattgagagaattaaagggagagacagacaattccacgaaaattgttgggcattttaaaacccaactttaataaaggacaaaacatccagagcaaatatcaagggaggaattagaggatttgaataaaactataagcaataactatagataacacttctctcaaaaactgcagaatacacattcttctcaagtgaacatggaacattctccagcacagatgatatgttaggccataagataagctcaataaacttaaaaagattgaaatcatgcaaagtatcttcactgaccacaatggaatgaaataagatatcaataacaaaaggaaaactagaaaatttacaaatatttggaaattaaacaacacagtatttaccaaccaatgaatcaaagaacaaatcatgagggaaattagaaaatgtttagagacgattgaaaacaaagatataacaagatgggtgtgatatatcaaaagcagtgctcagagttgtaacacctacattttaaaaaagaaacatgtcaaatcaataaccaaactttactcaataaatcataaaaggaagagcaaacaaaatccagagctagcagaaggaaggaaataaagattagagcagagataaatgaaattgagaattaaaaaattatacagagatcaacaaaactaaaagttggttcttttaaaatatcaataaaattaatatacttttacatagactaagcaaaacatctctattcagctgacttttttttttacaagggagccaacattattcagtggggaataatagctttttcaacaaaaagtgctgggaatactgaatattcatatgcaaaaaaaatgaagctggacccctacctcacattatatacaaaatctagattggatcaataatgtaaatatacgagtgaaaaccatacatgcttagaagaaaacatggaaataaaacattgctgtggattggcaatgcattcttagataatacaccaaaaatacaagcatgaaacaaacaaatgtagccaaaatgtaccagaatctgaaaacatgtattatctataaagaattagaggggaatttggtgaaagaaatatgggagaatgggatattgctctgtgaatgcttttgtgcataattgtacatttttaattaagttaatcttttacactctcaaagtgtgatattaagcaagcaaagataagttattacaagactctaaaaccgaatgcaatgagaaacaagtgaatccaaatatatttcaaatgaatgaatgacataatcaaacttaaggggaaaataataattaatctgattaatttttgactgttctcttatttcaaattgacttttgaacatactttgactacatactattgcttgaaaaaataaaatatctgcaaaaaattattaaatcttcatgataggattttttctttttatattagtataaatataacaattctgaaacaaatgtatgtgcattgtaagattaagccaatgagtaaatattaatatatttgtattgctagaaccccagattctcactgtgaaaggacagagatacagatatggaataagacaaggaaagaagcagcccactgagttacattagaatcagtattatcaacataaataagcaatgtgctctctcacatgctctttccttctcttaaaaaatatataatatgtacttattatatattatatgcatagacacacgtgtgtctatacatatcctacatgtacatattgaggattaacaggtgctagtagaaaatattaactttctttgtattaacaggtgttagtagaaagtagtagtaggtgctaagataaaagccataattaaacctcctggtgaatgaacacaccatcacctacaatcttaccaaaaatagaatcaagcacgtgtcctagtcaaacctctggattcaactgtcatttggataaaacgcaaaggatagtgaaaatgtcgatcttcactgagagtctcaccagcaaaattcacagtgtggacaccaagtgacaaaaatcccaaatttttcaacaaatatattgtatgggaaagaaaactttgaaaagaaacctgtatgttagaaggcattttaaaaacacgacaaatgaaaacaaatgggcaagactaaatcatagtgtcttggaatgcatgcatgaaggacacagccgtgaaaatgcaaggacgcctctactggaacagtcatgtttatcgtcacttttcaggagaaaggtggctgcagttgaggagagtcacatgcttcagggctggcaaagtcctatatcttgacttatgtgatgattacagggatgtttacaaaaatcaaactataagtttgttttgtgccatgttttgtattgtgtgtgtgtgtgttttgtttttcaacttaaaaataaataaaatcaaaaccaaggcttcattatcaagtagcacaaagtctccaatctataacctcctttgtctggatatctgcatttaactaccattgccagagctaatcctgacaatgcattcatatttttaacactgaaacacagtaaacagggaaaattttgctcctctaaaacagggcatcttcaggcaatcagaacaactcagaaagtttctgtctgttgcataaaactcccctgtgcaaagagttacacaaaatgctgtcatagtaaaggtagttaactaacggcactaattgttcttgggcagtggccaagtggaacttcagagacctggcattgccaaccagaaatcaattgtcatgggaattgtctcctggaatcactttggttgtcccagggtaacgcagggaaagtggttaatgggtcacttcggggtggcatcttcatcagtaaatcacatttactttctcctactaagaattttatttttggccatgaagccaaaagtcagctcttaaataacaagggaagcaaataatcattgaataaaaatagcagaaagaaaaagctgtgcaaagaaatttatgtttttaatttgttatatatgtatatttttatcatactttaagttctagggtacatgtgcacaatgtgcaggaataaaatttatgtttttaaaatttattctacattatgaattctacattagaaaaataaaccatagcctcatcacaggcacttaaatacactgaagctgccaaaacaatctatcgttttgcctacgtacttatcaacttcctcatagcaaactgggagaaaaaagcaatggaatgaataaaatgatagccacaaaaatcaaggtgggagaaatacttattatatgtccataaaaaattttaattaatgcaaagtattaacatcaatgattgcagtaatacagatcttacaaatgatagttttagtctgaacaggactatccaaaagttaattttctatagtaacagtttttaaataaaatatcaattcctgaaacacataaaatggtccatgagtatacaacgagtgaaaaaaaacaaattcagagcaaagataaattaagaagtatctaatattcaaacatagtcaaagagagggagatttctggataatcacttaaacccatggttaaacataaatgcacatatgttaatgtttactgaataacttatctgtgccaagtggtgtattaatgattcatttttatttttcactaaatcttttctctaaagttggtgtagcctgcaactaaatgcaagaaatctgacctaggacctgcacttcttaccattttgctcatatttattccctgtgcatttttgtaacatgtatatgttatatatatagaaagagagagaggcagagatggaaagtaatttatggagtttgatgttatgtcagggtaattacatgattatataattaacaggtttctttttaaatcagctatatcaatagaaaaataaatgtaggaatcaagagactcattctgtccatctgtgatagttccatcatgatactgcattgtcaagtcattgctccaaaaatatggtttagctcaacactgagtgactataggaaaccagaaaccaggctgggcgctaaagatgcaaagatgaatgagacatcatctctgccgtccaaaagcttactgtctagtgggagagttacacacgtaaggacagtaatctaataagagctaataagtgaaaactaagataaattaataatacaagattacagggaaggtttccaaagtcaatgaggcctcaaatgaatcttgaaagtgtgcaaggattaaccaaatgaagaaatgtgtaagtttttcaaacaaaaaggaacagcatgagcaaatgcaaggaggcctaaaataaagagatgtgtaaagaggtgtaagcagctttgtactgctgcctgataattagaagaatatcgggagtaacaagagctatagaagagagtcacaattatggaaaaatatttattaaattataagaaatttatagcataaggaatagtaggaccgttaaatgttttaataaagatgatgcttcttttaatatttatttttattatactttaagttctagggtacatgtgcacaacgtgcaggttacatatgtatacatgtgccgtgttggtgtgctgcacccattaactcatcatttacattaggtatatctcctaatgctatccctcccctctccccccaccccacaacaggccgcggtgtgtgatattccccttcctgtgtccaagtgttctcattgttcaagtcccacctatgagtgaaaacatgcggtgtttggttttttgttcttgagatagatgatgctttaaattgaccactctagctgcattgtgggaggaaaaaagattttagaacaagactagaaacagaataattagaaaaatgcaactacaatgcagatgagtgattatcaaggtctgaactgaatagtggaaatagagataaggaggcaaattcaagatatgtgcgtgacagtaaaattaacatgacctggtgtttgattgactcggtaaagtgaaaggaaaggatgaataatcaacaaataatatttattctaccaaatgcctccatgccgctttgatgacaggataatatgtaagcttttctatatttcagaaactatatgacatgacgaaaagtaaaaaggggatgggggtaaggaggtatcctgaattgactgagaaataaggaggtattccacagagaatataaataaacatatacttagtgttcaaggaataataaaaaagagaacatctatgtgtccaccatacaggatatgaaatagaacatttgccggccatggtggctcacacctgtaatcccagtactttgggaggccgaggtgggaggatcacttaagcccaggacacaggttgcactgagccaagatcacactatcgtactccagcctgggccaccatgtctcagaaaaataaaaaaactagatgtcttggaggattggaaacaaaatagaactttactagtgccttagacgcccattgggtgctccttgccaattgtgttctcctttatttcctgctggatatgaccactgtccttccattgcattgtatgtgttttttaatagactttaatggttctcaagtgatgcattatttagtttggttctttgaaacttatataaatgaaattattttgtagaagttctttcacctttatcagaaggtactttcaccttgattcaataataagtttgcatattacaaccttgttgaatgttggtgtaattcatccattcgtattgctatatgatattccactacatgaatatgtcggacttcattcctcagatctattgttgatgaacacttgaaatttttccagtttttaaccattacaaacaatgctgctatgaacattcttttgtaaatcacctggttcatatgtgcaagatatcctctgggctatatatttaaaagtaaaattattgagttattcaacattaccatgaaatgctacactattttttttaacaatcctaccaatttacacttctaccacgaacagataagcattaccattggtcttcatttgtaggaaccatatttgtcttttgctctgggggctttgttttgttttgctttgttttttgcttagaagtgctttggctattagggatctttttttggctccatgtgaactttaggatttttttttaattttgtgagaaataacgttggtaatttgatgggaattgcattaactctatagattgtatgggtgatatggtcactttagctattgatttttctaatccatgagcatgggatgtttttccatttgtttatgtcatctataatttctttcattagtattttgtagttctccttgtagagatctttcatttatatagttatgcattcctaggtatttttcatggctattgtaaattcagttgagttcttaatttggttctcaacaaattaatctcaacaaacattcaaacagcttgaatgtatttggtgtatagaaatacaactgatttttgtggcttgtttatcccaagactttactgaagtcgtgtatcaagtctaggagtcttctgaagactttagggttttctaggcctacagtcatgtcatcagtgagcagagatcatttgacttcttttctaatttgtataccttttatttctttctcctttctgatagttctggctagcacttccagtactgtattgaataggaatgatgaaggtgaacatccttgcttttttccagtttctagaagcaacacttctaacttttgcccatccaggatgatgttggctgtggctttgtcatagatgactcattttttgaggtatactccatctatacctatattgttgagggtttttatcataaacagatgttggattttatcaaatgcttattctgcatctaatgagatgatcatagggtttttgttctcagttccatttatgtggtgaatcatgtttattgatttgtctattttgaaccattgaagcacccctggaataaagcccacttgatcatgatgaattatctttttgatgtgttgttagcttcagtttgctagaattttgttgagtatttttacatctgtgttgatcagggataaggatttgtagttttcttttgtgttctttttaaaattttccttgttaattttactgcacagtattattttaatgatgaataaagtgttgagctggacatgtgtaccttgttcctcatgttagaatgaaactgtttaatatgtcatgattatttataatgttgagagtagtttttgtgtatatattaagatatttacatcagttctcttctattcctagtttgttattattacaaatagtttcaaatgtgaacaagtgcttttcccacagctattgaaataaccatatttttttcttttattcagttaatgtggttaatttcattgtttggttttctaattttaaaccatacattcttgaaattactgcacttagtcatgatgtatttttctttggagtatattgttggattatatttgcaaacatttttgtttagaattattatgtagtatattagtctgtaatttcatttcttttaatatccttgtatggttttactatcatggaggtaccaccatataaaacaagttggaaagtgttatgtcttcccaattctctaaaaatattcatgtaacattggcattatttctttattaaatatttggtaatatttctttattaaatattgcatccacctagccctggagttctttctacaggaaaaaaaaattttctaaataaaatttccacaatgaaaaaaaaactactcagtttttctagtttttttctgatcatttcataaaagtaggtatttttcataggaacttgaccattccttatgattgtcaaatttattaatataaagtttcatattttatatttattttatcagataaataaaattatatgttttgaaatatatattcattgtaaaatagccatgttaagctaacatatgcattaccttacatgcttatctttttttatgagaacacttaaaaatctactcttagcaattttgaagaatacaagtacatcccctatggagaacagtttgaaggctcctcaaaaaagtaaaaatagagctaccatgtggtccagcaatcccactgctgcatatataccccccaaaaaagaaatcagtatatcgaagagatatctgcactcccgtatttgttgcagcactatttacaatagcgaagttatggagtcaacctaagtgtccatcaacagatgaatgaataaagaaaatgtggtacttatatacaatgaagtattattcagccataaaaaggaatgagaccctgtcatttgcaacaacatagatgaaactggaggtcattatgttaagtgaaataagccaggcacaaaaagacaaatactatgtgttatcacttatatgtggaatccaaaaagcaaacaactgaactcatggagatagagagtagaaggaagtataccagaggctgtgaagggtagtgggggttgggagaggtgggggatggttaatgggtacaaaaaaagaaagatttaataagacctagtatttgatagcacaacagggggattgcagtctaaaattcaattatacatttaaaaataactgaaagagtataactggattgtttataacacaaataataaatgcttgaggggatgaatatccaattttccattatgtacttattgtacattgcatgcctgtaccaaaatatttcatgtaccccataaatgtatacacctgctatgtacccacaaaaattaaatttaaaaacaatacattgttatccactatagtcaccatattgcacaatagatctgttgaattcattcctcctgtacaatgcaattttgtaccctttgaccaacatctacccaatcctcctggtaaccatcattctactctgtacttctatgtgttcagccttcttagacctccacatacaagtgagattatgcagtatctggctttctgtgcctggattattttactcagtataatgtcctcccggttcattcatgttgtcacaaatgatactttttttattttttaaggttgtatactattctattgtgtatgtgtaccacattttcttcatccactcatgtgtcgatggatacttaagttaattccacatcttggctgttgtgaataatgctacaacaaatatgggagtacagataactcattgacacactgatttgatatctttttaatatatgcccagaaatagcgttactgaatcatacggtaattctatttttacagaatcatttatactgtcttttacaatggctgaaatagtttacattctcaacaattacaaggttttccttttctccacatcctctccaacacttggtatcttctgccttttctgtaacagccattctaacggatgtgaaatggcattttattgtagttttaatatgcatttctctgatgatcagtgataattagcatttttatatatctgttggccatttgtatgtcttcttttgagaaatgtctatttagatcctttgtcaatttttcattagggttccttgttttcttattattgtgttgtttgagttcctaagatattttggacattagcctcttatcaaatgtatagtttgcagataatttctcccattttgtaggttatcacttcactctgttgactttcttttgctgtgcagaagctttttaggttgatgctattccatttgtgttttgttgcttttcttgcctgtgctttagagtcatatcataaaatattattgcccaaaccaatgtcttggagttattcccctgttttcttccaggagttctatagtgctaggtcttacatttaagtctaacttattttgaatttatatttttatatggtatgaaataagggcctaagatcaatcttgtggacattcagttttctcaacaccattttttgaagagactgttctttccccatgtgtgttcctggcacctttgttgaaagtcaattgactataatatgtagatttatttatgggctctttattctgtgtaattggtctatgtgtctgcgtttatgccagtaccatggtgtttcgattgctatagctatgtagtataatttgaagtcaggtaatgtgatatctcctgccttgcttttttcgatcaagattattttggcttttcagagttttttgtgattccatacagatttgagagttgtttttctatttctgtgggaaaatgtcataggaattttgatagagattgcattcaatatgtacatcactttggatagtatggacatttcaaacatattactttttccaatccatgaacatgatatatctttccatttatttgtggcttcttcaattgttttcatcaatgttttgtagttttcagtgtaaagatcattcacctctttgtttaaatttacatctaagtattttttgttgctattataaataggattgttttcttgatttctttttttgtatagtttgttgttgatgtgtagaaatgctactgaattttgtatgttcacattgtatcctgcaactttactaaattcatttatgaattctaaattttttggcagagttattggtgttttctatatataagatcatgtcaactgcaaacagaaacaatttaacttcttcctttccaattttcatgccttttatttctttcttttgcctaattgctctggctaggacatccagtactatgttgaatagaagttctgagagtgggcacccttgtatgaagttttccacaacatctcttatctttttattagctatatattaatacggatgtttcttcttcatcaggagtttgaaaaatatgtcttttctctatattgttcttaatcagtcttcctagaagtatttcaatttcaaaaagtagcaacaactgtgggagttcagtcaggctggtgggaaaaattttaaagatagttataagaaatcgacacaaaccttcatggaaggctgggggtgttgtatagcttcagtaatagatctgaatgaaggcggcctaatccttccttgagtaaatagcttaaagtaggtgcaaaggaatgtaagggagtttatctaaataacttgtttactcatgtggtcctgaagccaacctttgatcattcacaggcaggatggctctctctcgggggagggtgaccaggttaattaccctctatttgtgttgactaaaagcccctgtcatttaatgttttttcaataaatgctggcagggctagctagtcagggctcgtggctgccagaactctttctgtgcacggcccagccccctagcggctctttcactgaataattggtgtctgagtacattattcatccctcgtgcagctggggtctgcaggacagacccccacaaacaacaatttgcaaaagcaaacttccctgttttgtttttttccaaagatgataaattagaggcttttagtatgcctcggccactgagaaatagcaagagagtgcacaaaggtcaactctgtgagctctaagtcaagaaggaaaatgggaatccaccagaatcatgaaggacatcatagatcccaagaaggagaatgtgagcaaacagtcaacatgacagcaaccagcttataaaagtgagcgaagtcctagtatgtgagagaggcagagagcctccctctgtaactgacattttcactgtgaatctgagcaaccccagccaagttgttgcattttctttctcccaaggcctggagtcaacatggggagaggcttggagatgctgtgaagcaaagacactgggaacagctgcagacattttcccagaccaggaagtaagagcaagatgccattttcaatctggatgcatgcaaagtcagctttttttttttctttttgtgacccagcagaatgcctgcacaggcattttagtctcaggccaaagattggaacaactgctttggggcttggtagggaccttcacagccatattgtggaaaacacctcagcagtatgtgctggaattgtgctttcccccatcgcagcctcggggcaacagaaaagctgctacagctgtaatttctcccaggtgatgaaacttgcagccagggccagcttggagacctacaaccagtctgcaggtgtcattgctgggtgccccagcctgttcccctgagaatgtgatacagcagggctttctctgcttcacccccaggcagaaattcaggcattggagcacctgtctacctggaccagcatcctgagctaccccaccgtttataaacataggttgtggtgcagtggggccctctccagtctatggccaggcagatttccaggtatgtggagtacccacttgactggatcagcagcctgagcttccccaaccttcctgtgctgagattatagtgcagtgaggccctctcatctccacacataggcagacctccaagcaattagagcacctgctcctatggagaacttaaatttacaagaaaaaaaaaaaacatcaaaaattggccaaaggacatgaacagacaattctcaaaagaagacatggatgtggccaacaaacatatgaaaaaaagctcaaatcactgatcattagagaaatgcaactcaaaaccacaatgagatactatctcaaaccagtcttaatggtgattatcaaaaactccagaaacaacagttgctggtaaggctgtggagaaataggaatgtttttacactgtttgtgggaatgtaaattagttcattcactgtggaaggcagtgtgaaaattcctcaaagatctagaaccagaaatgccatttgccccagcaatccctttactggatatatgcccaaaggaatataaatcattctattataaagatacatgcacagggctgggtgcagtggctcacacctgtaatcccagcactttgggaggccaaggcgggtggatcacctgaggacaggagtttgagaccagcctagccaacatggggaaactccatctctactaaaaatacaaaaattagccaggtatagtggtgcacacctgtaataccagctactttggaggctgaggcaggagaatcgctggaacccaggaggcagaggtcaaagtgagccaagatcataccattgcactccagcctgggcaacaagagcaaaactccatctcaaaaaaatatatatatatacatatacatacatatatatacacatatatatacatatatacagatattatatatgtaaatgtatatatatgtgtatatatatacacacatatatatacacatatatatacatattataactacatatatatacacacacacatacatatacatgcacacatatgtttattgcagcactatttacgatagaaaatacatggaatcaacccaaatgcccatcaatgatatattggataaagaaaatgtgatatatattcaccatggaatactatgcagccgttaaaataaatgagatcatgttctttgcagggacatggatgaagctggaagccatcaccctcagcaaactaacacaggaacagaaaaccaaacaccacatgttctcagtcgtaagagggagttgaacaatgagagcaaacacatggatacatggaggggaacaacacacacaccagggcctctcagggggacagggggtaggagaccatcaggacaaacacgtggatacatggaggggaacaacacacaccaggacctctcagggggacagggggtaggacaccatcaggacaaacacgtggatacatggaggggaacaacacacaccagggcctctcagggggacagggggtaggagaccatcaggacaaacacgtgggtacatggaggggaataacacacaccagggcctctcagggggacagggggtaggagaccatcaagacaaacacgtggatacatggaggggaacaacacacaccagggcctctcagggggacagggggtaggacaccatcaggacaaacacgtggatacatggaggggaacaacacacaccagggcctctcagggggacagggggtaggagaccatcaagacaaacacgtggatacatggaggggaacaacacacaccagggcctctcagggggacagggggtaggagaccatcaggacaaacacgtgggtacatggaggggaacaacacacaccagggcctctcagggggacagggggtaggagaccatcaggacaaatagctaatgcatgcaggacctcatacctaggtgatgggttgatgggtgcagcaaaccaccatggcacacatttacctatgtatcaaacctatactttctgcacatgtatcccagaacatgaaataaaatttaaaaaatatatacactgattcatgatctcctttctctccttctgaaacactctttaaaactttttagcatttccccctctgtcttccatgtctcctaactacatgtttcttattttccatgtctttattcctgtgttcattttggatagccccttctgacctatattacagtttactagttcactcttcaactgcttctaacatactaatattctgttaaaaccattcatttgggtttaaatttcaattatgttattctctatggacattctatttgttttcttttaatcttcttggccattctctagagtttcctgttccattatgatatttttaattttttgttttactttaaacatactaaatatagttattttattttattttctgtatctgatactttcaataactgcagtctttgctagtcttttttctgtgctcttgctcatagtttttttcatttgttttcatgattagaaaaacagagagagaagaaggagagtaaagggaggaggaggaggaggagaaaagaagaaagcagagaagaagggacagagaaaaaaaggaagttggttctaacgtttctctaacaactggcttcagtgaaacactcccaccttgtggatttttaggttattgaaattaaccagtcttctgggtgcagcacaccaacatggcacatgtatacatatgtaacaaacctgcactttgtgcacatgtaccctaaaacttaaagtataataaaaaataaaataaaaagctacacaaatttaaaaaaaaagaaatcaacctaattcctagattaccacctattgattcaaatgctttaaatctaggcttttcatctgagtctttctttttagttattctgtttatcttcaaaacactcctgctttgaatcattcaaaatctacctccctccctctgtttgactaccatcaatttttttgctcattcctaatgcattaatctattagctgtgaatatccaaaaaccctcatttcactgaatctttgacagacccctttgcatcttcttgttcttctaattatttcctcagaaactttatgttctcttttctttacaagcatgtcatagtttatatataatgtgtgtattgtttttatatatacctatatatagcctctttttaaaagcactatacaccatgatttgaaatatattctaaaatcaggtagcatgaaaatggaaacataacatactaaaacatatgggatgcaacaaaagcagttataagagggacatttatagcaataaatgcctacatcaaaaaagaaaaaaaagatctcaaataagcaacctaatattatgcctaaaggagcgagaaaattagagaacaatacaagcccaaagatagcagaaggaaacaaataacaaagatcagagcagaaataatataatagaaactgaaaatttcaataaaaataagaattgttttttgaaaagataaacaaaattaacaaattcttacatagactaagaaaaaagaaaacaaactcagaagtgaaagaagagacattacaactgataccacagaagttaaaaaatcataacatactactataaacaattattcaccagcaaattagataacctagaagaaattgataaactcgtaccaaaactgaatcatgaagaattcaaaatttagaagaaatcatgaataaggaaattaaatcaccaatgaaaggtctctcataaaagaaagacccaggattgaatggcttggtggctgaattccaacaaacacttagatgactaacaccaatccttcccaaactcttccaaaaaaagtgaagaagaggaatacttccaaattcatttttcaaaaccagcattaccctgataccaaaaccagagaaggacactataataaaaataaattgcagaccaatactcctgatgaacttggatggaaaaaccttcagccaaatattagcaaatattattttaaaaaaaacacagcaaaaaaattcaccatgcttaagtgggattcatccctgggaagcttattagtcttatttgattcgtataatcagaaaatttctatgtctagtgaagagaaatgagagcaatagagactcatagcacctcaacaaatgtccaggcttgagccagttaacaaatacaagtccttcaaatacaaaaaagactgtgaaagaaaatagaacagatcaatgaaactaagaatttgttctttgaaaagataaaactgacaaaccattagctagactagaaaaatgagagaatactcaaagcaataaaatcagaaatgaaagaggaaatattgcaactaataccacagaaatacagaggatcataagaggccactataaacaattacaagccaacaaattggataacctagaaaaagcagataaatttctagaaaaatgcaacttacctagagaaagtcaagaagaaagataaaatctgaacagaacaatactgagtatggagagtatatcaataataaaacatctcccatcaaagaacatcccaggaccagaaaacttcattgctgaattctaacattttaaaaaataataatacaatccttctgaaattcttccaaaaacttgaaggagaaagagtgtttccaaactcattttaaaagatcagcattattgttttttttttaaagtgatgttccccttcctgtgtccatgtgttctcattgtccaattcccacctatgagtgagaacatgcagtgtttggttttttgtccttgtgattgtttgctgagaatgatggtttccagcttcatccatgtccctacaaaggacatgaactcatcattttttatggctgcatagtattccatggtgtatatgtgccacattttcttaatccagtctatcattgttggacatttggattggttccaagtctttgctattgtgaatagtgccacagtaaacatacgtgtgcatgtgtctttatagcagcatgatttatagtcctttgggtatatacccagtaatgggatggctgggtcaaatggtatttctagttctagatccctgcggaatcgccacactgtcttccacaatggttgaactagtttacagtcccaccaacagtgtaaaaatgttcctatttctccacatcctctccagcacctgttgtttcctgactttttaatgatggccattctaactggtgtaagatggtatctcattgtggttttgatttgcatttctctgatggccagtgatagtgagcattttttcatgtgttttttggctgcataaatgtcttcttttgagaagtgtctgttcatatcctttgcccactttttgatggggttgtttgtttttttcttgtaaatttgtttgggttcattgtagattccggatattagcactggggcctgttgtggggtggggggaggggggagggatagcattaggagatatacctaatgttaaatgatgagttaatgggtgcagcacaccagcatggcacatgtatacatatgtaactaacctgtacgttgtgcacatgtatcctaaaacttaaagtataatttaaaaaataaataaataaaaataaaaataaaaaggcaaacaaggacactataagaaaagtatgggccaaacaatatccctgatgaacacagatacaaaagtcctcaaaaaaaagtactagcaaacagaatttaacaacatattaggagaacatttaccatgataaagtggatttatcctccagatgtttcagcaaacacaaatcaaatgtgataaaccacattaacagaatgaaggataaaaaaatagctatctctatatatgcagaaaaagcatttgactaaattcaaaatcctctcatgactaaacctctccacaaattgggcatagaaggcatgtaccttaacacaaaacaggacatatataacaagctcacagctcacatcatacccaacaatgaaaaagtgaaatcttttctgctaagatcaaaaacaagacaaggatatttattctcactacttctattcaacttatttctggaagtcctagccagagcaattaagccaaataaagaaataaaagattcaaattgaaaaggaagaagtaaaattgtctctgtttgatgacatattatatataggaaaccctaaaaactccaccaaaaagctatcagaaatgataaatgaattcaataaaatttcagaattcaaaatcaatgtacaaaactcagtagtttctttacactcacaacaaactatatgacaaaaataaagaaatcaatctcattcacagtagcatcaaaaaaaacgtattttttttgtttaggagcacatttaggattgtacttaggagtacatttaaccaaggaggtgaaagatctgtattctgaacactataaaacattgatgaaaaattgtagatgacacaaatacatggaaagatagtttatgttcatgggtaggaagaattaatattcttaaaatgtccttactgcccaaagcgatttataggtttaatgcaatatttatcaaaatttcaatgtcattcttcacagaaatagaaaaaacaatttgaaaatttatatggaaccacaaaggatcctgaataactaaaggactcttgagcaataagaacaaagctgaaggcctcacaatctgacttcaaaacatattacaggaaaagaacaaaagaaggaagaagagggtagaggagaagtgcagcaagggtggagggaggtgcccacgctgggtcggaggagcaggaggagtatggagggaagactcctgggtggcatggagctcttgcacctctaggcactgcccagccctgtgtcagccagggctgaacccccacaggataaggaagcctgtgtgtgtaccaacaatcaaagctacatctgtgacacaacaggacactgctatgggcagtctcagtgttgtaactactactatgaacattggtggttctggctggcatggaccatcaccatcatcctgagctgctgctgtgtctgccaccacagccaagccagccctcaagtccagcagtagcaacatgaaatcaacctgactgcctatccagaagcccgcaattactcagtgctaccattttatttcaccaaactatttattaccttcttatgaggaagtggtgaactaacctccacctgtttccctccctgtctgtccattctggatgagctctgagccctgttttcctgtgaagattctttgaattgcagccattctattcacatgaactctcacatctggagcacagatggccctctcaaggtaatttattgtatgcattgactgtttaccaaacaaatgtcttactatgtactcaggtatattcagcagcattgtcgactgcagtcccctatgcttgccagaagatactgtattcaaagtagaagtttcacagtgatgagtaatcactgcaattttcccattgctccatggactctcggaggccggtgttctgttccctgtaaatagagatgtactctgaacctttctgcctccctcagctgttcctagtccttggtatcagcccctggagatgtccacaaccacttaggacaaaaggcaaaagtggaatttcagacaaaactttgataggatcttcagtgataaacttggactaactgtggcccaggtatcagcactcccaagaattgccaggaggaagctttggcagacaccacaggtatggcaaggcctatctccctctgctgaatccaacaggggcaagcaagctggcatgtggcttgaggtgacccgaatatgtcagcacccctcagatgtctttctttgcacttttgaaaaaaatctcagaatttgctggcaacatggccaaataggaacagctccagtctgcagctcccagtgagatcaatgcagaatgcaggtgatttctgcatttccaactgaggtacctggttcatctcactgggactggttggacagtgggtgcagcccacggagggtgagccaaagcagaatggggcgttgcctcacccaggaagtgcaaggggttgggggaattccctcccctagccaagggaagccccgagggactgtaccatgaggaacggtgcactccacccagaaactatgcttttctcatggtcttcacaatccacagaccaggagattccctccagtgcctctgccaccaaggccctaggtttcaagcacaaaactaggcagctgtttgggcagacaccgagctagctgcaggaggttttttttttttcatgccacagtggcaactggaatgccaacaagacagaaccattctctctcctggaaagggggctgaagccagggagccaagtggtctggctcggcgggtcccacccctacagagcccagcaagctaagatccactggcttgaaattcttgcacagcagtctgaggttgacctaggacactagagcttggtggggggaggggcttccacattgccaaggcttgagtaggcagttttacccccactgtgtaaacaaagccaccagaaagtttgaactgggtggagcccaccacaactcagcaaggccacagcagccagactgcctctctagatttctcctctctgggcaaggcatctctgaaaaaagggcagcagccccagtcagagacctatagataaaacccccatctccctggaacagagcacctaggggaaagggcggctgtgggcacagcttcagcagacttaaagcatctttgaaaagcctgatggctctgaagagagcagcagatctcccagcacagtattcgagctctgataagggtcagactgcctcctcaagtgggtccctgacccccgtgtatcctgactgggagacacctcccagtaggtgccaacaggcacctcatacaggagagctctggctggcatctggtgggtgcccctctgggacaaaacttccagaggaagaaacaggcagcaatcttggctgttctccagcctctgctggtgatacccaggcaaacagggtctagagtagacctagggcaaaccccaacagacctgcagcagaggggcctgactgttagaaggaaaactaacaaacaaaaaggaatagcatcaacatcaacaaaaaggacagccactcagtgaccccatcagaaggtcaccaacatcagaaaccacaggtagataaatccatgaagatggagagaaaccagagcaaaaaggctgaaaattccaaaaaccagaacgcctcttctcctccaaagtatcacaactcctcaccagcaagggaacaaaagaaaactggacagagaatgagtttgacgaattgagagaagtacgtttcagaaggtaggtaataacaaactcctccaagctaaaggagcatgtcctaacccaatgtaaggaagctaaggacctggaaaaaaggctagaccacttgctaactagaataaccagtttagagaagaacataaatgacctgatggagctgaaaaacacgccatgagaacttcatgcagcatgcacaaggatcaagcactgattcggtcaagcggaagaaagatatcagagactgaatatcaacttaatgaaataaatcaagaagacaagattagagaaaaaagaatgaaaagaaatgaacaaagcctccaagaaatatgggactatgtgaaacgaccaaatctacgtttgattgctgtacctgaaagtgatggggagaatggaaccaagttagaaaacactcttcgggatattatccaggagaacttccctaacctagcaaggcaggccaatattcaaattcagaaatatggagaacatcacaaagacactcctcaagaaaagcaaccccaagacacatagtcatcagattgagcaaggttgaaatgaaggaaaaaatgttaagggcagccagagagaaaggtcaggttacccacaaagggaagcccatcagactaacagcagatctatcagcagaaactctacaagccagaagagaatgggggccaatattcaacattcttaaagaaaagaattttccacccaggatttcatatccagccaaactaagcttcataagtgaaggagaaataaaatcctttacagacaagcaaatgctgagagattttgtcaccaccaggcctgccttaaaggagctcctgaaggaagcactaaacatggaaaggaacaactggtatcagccactgcaaaaacataccaaattgtaaagaccattgacactatgaagaaactgcattaactaacagcaaaataaccagctagcatcgtaatgacaggatcaaattcacacataacaatatcaaccttaaatgtaaatgggctaaatgctccaattaaaaaacacagactggcaaattggctaaagagtcaagacccatcagtgttctgtattcaggagacccatctcacgtgcaaagacacaaataggctcaaaataaagggatggaggaatacttaccaagcaaatggaaggcaaaaaaaagcaggggttgcaatcctagtctctgataaaacagactttaaaccaacaaagatcaaaagagacaaataagggcattgcataatggtaaaaggatcaatgcaacaagaagagctaattatcctaaatatatatgcacccaacacaggagcacccagatgcataaagtaagctcttagagacttaaaaagagacttagaccctcacacaataatagtgggagactttaacaccccactgtcaatactagacagatcaacgaaacagaaagttaacaaggatatccaggacttgaactcagctctggaccaagtggatccaatagacagctacagaactctctaccccaaatcaacagaatatacattcttctcagcaccacattgcacttattctaaaattgaccacatatttggaagtaaaacactcctcagcaaatgcaaaaaaaaatgggaatcataacagtctctcagatcgcagtgcaattaaattagaactcaggattaagaaactgactcaaacccacacaactacatgtaaactgaacaacctgctcctgaacaactactgggtgaataaagatattaaggcagaaataaataagttatttgaaaccaatgagaacaaagacataacataccagaatctctggtacacaattatagcagtgtgtagagggaaatttatagcactaaatgcccacaagagaaagcaggaaagatctaaaattgacaccctaacatctcaattaaaagaactcaagaggcaggagcatacaaaaagctagcagaggacaataaataactaagatcagagcagaactgaaggagatagagacacaaaaaaaccttcaaaaaaaaatcaatgaatccaggagctggttttttgaaaatatcaataaaatagatagaccactagccagactcataaagaagaaaacagagaagaatcaaacagatgcaataaaaaatgataaaggagataccaccactgatcccacagaaatacaaactactatcagagaatactataaacacctctacacaaactagaaaatctagaagaaatggacaaattcctggacacatacgccctcccaagactaaaccaggaagaagttgaatccctgaatagaccaataacaaggtctgaaattgtggcagtaattaatagcctaccaaccaaaaaacagtccaggaccagatggattcacagccgaattctaccagaggtacaaagaggagttggtaccattccttctgaaactattccaaacaacagaaaaagagagaatcctccctaactcattttatgaggccagaataattctggtaccaaaatttggcagagacacacacaaaaaaaagaaaatttcaagccaatatccctgatgaacatcgatgcaaaaatcctcaataaaatactggcaaaccaaatccagcagcacatcaaaagcttgtccaccacaatcaagtcggcttcatccctgggatacaaggctagttcaacatacgcaaatcaataaacataattcatcatataaatagaaccaatggcaaaaaccacatgcttctctcaatagatgcagaaaaggccttcgacaaaattcagcagcccttcatgctaaaaactctcaataaactaggtactgatggaacatatctcaaaataataatacctatttatgaaaaatccacagccaatactgaatggtgaaaaactggaagcattccctttgaaaaccagcacaagacaaggatgccctatctcaccactcctattcaacgtagtattggaagttctggccagggcaatcaggcaagagaaagaaattgtctctgtttgcagatgacatgattgtgtatttagaaaaccccatggtctcagcccaaaatcttcttaagctaataagcaacttcagaaaagtctcaggatacaaaatcaatgtgcaaaaatcaagcattcctatatgcaaaaaacagacaaacagagagccaaatcatgagtgaactctcccattcacaattgctactatgagaataaaatacctaggaatccaacttacaagggatgtgaaggacctcttgaaggagaactacaaaccactgctcaaggaaataagagaggagacaaacaaatggaaaaacattccatgctcatggataggaagaatcaatatcatgaaaatggacatactgcccaaagtttttatagactcaatgctatccccatcaagctaccactgactttgttcacagaattggaaaaaactactttaaatttcatatggaaccaaaaatgagcccgcagagctaggacagtcctaagcaagtagaacaaatctggaggcatcacgctgtctgacttcaaactatactacaagccttcagtaaccaaaacagcatggtactggtaccaaaacagatatgtagaccaatggaacagaacagaggcctcagaaataacgccacacatctacaactatctgatctttgacaaacctgacaaaaacaagcaatggggaaacgattccctttttaataaatggtgttgggaaaactggctagccatatgcagaaaactgaaactggatcccttccttacaccttacacaaaaattagctcatgatgtattaaagacttaaacataagatctaaaaccataaaaaaccctagaagaaaacctaggcaatatcattcagtacataggcatggacaaaaacttcatgactaaaacaccaaaagcaattgcaacaaaaaccaaaatagacaaatgggatctaattaaactaaagagctcctgcacagcaaaagaaactatcatcagagtgaacaggcaacctacagaatgggtgaaaatttttgcaatctatccatctgacaaagggctaatatccagaatctacaaagaacttaaacaatttacaagaaaataacaaacaaacccatcagtgggtgaaggatatgaactgacatttctctaaagaagacatttatgcagccaacaaacatatgaaaaaaagctcatcatcactggtcatcagagaaatgcatatcaaaaccacaatgagataccatctcacgccagatagaatggcgatcattaaaaagtcaggaaacaacagatgctggaaaggatgtggagacataagaatgcttttacactgttggtgggagtgtaaattagttcaaccattgtggaagacagtgtggtgattcctcaaggttctagaactagaaatatgatttgacccagcaatcgcattactgggtatatatccaaaggattataaatcattctaccataaagacacatgcatacatatgtttattgtggcactgttcacaatagcaaagacttggaaccaaccaaaatgcccattcaatgatagactgcataaagaaaatgtggcacatatacaccatggaatactatgcagccataaagaaggatgagttcatatccttttcagggacatggatgaagctggaaaccatcattctcagcaaactaatccaagaacagaaaaccaaacacccgatgttctcactcataaatgggagttgaacaatgagaacacatggacagagggaggggaacacaacacaccggggcctgtctgggggtaggggctaggggaaggttagcattgggttaaatacctaatgtagatgatgggttgatgggtgcagcaaaccaccatggcacgtgtatacctatgtaacaatcctgcatgttctgcacatgtaccccagaacttaaaatataatttaaaaaaaaatctcaaacaactcactgaagtgtctcaaagctgaacaagttttaccaaaatgaatccttctcagttaactgatcaaatggatgaatcctgaccctctgaagtctctttcctgagttagagcagggaactgctctgagtgttaactgttggattcactgcagtgtcctacaatattttacaagaagatgaaaaggcaacctgcagacctaggcttgattcccaagtcacagtctgacccctgctacaggaggttaccctcctcaggaagagatagaaatagggaatttgaaggaatagtgaggggaccagggagatttgattgagtctggtttccaggtgaattaaaaggaagggtgtcatccagggtttgttgctatagtcaaaagaataaataaatcaatgaagaaataccttcattgtctgtggttttcatgcagatatactcatggaggttgtatctctccaaaaacagacaaatccaaggctgtgaacaagcatccacatttgaattccattaaaccaaaatctatgttgaacgaagtgaagtctgtacacagcattgcaaatgtgaacacattcctgtgtgaggcacatcaccatttgtcagttattgtgaatatgtgtatttttaagcaataagatgcagctggtcagttttctgggcaatcttggcgaggcatttcctgtgctgtggttgttctctaaccactgtgagaaacccaaataaaaatcgatccccccccaaaacaaatacgtatcacaaaaccacagtaatcaaaacaacatgacacttgcacaaaaacagacacattgaccaggggaacataataaggaacccagaaataaactcatgcatttatgaccaagaaatttttgacaaaggtgcccagaaaacgtaatgaagaatagacatttgtttcaataaatggtgttaagaaaactagatatccacatgcagaagaacatgaatgtgtatggtgtgtatccttatctcacaccatacacaaaaatcaattcaaaatggattaaaggtttaaacataaaactgtaaaactactagatgaaaacataggggaaaagttccacaatgttggtttggtcaaagatttcttggatataacccccaaagcacaggcaacaaaagcaaaaatatatgggattgcatcaaactaaaaagcttctgcacagcaaaggaaacaatatggtgaagagacaacctacaagttgtgagaaaatatttgcagagcatacatctgatgaaaggctaatctccaaatatataagggactcaactcaatatcaagaaaacaaataaccaagtcaaaaaatgggcaaggtcctaaatagacatttctcaaaaaaaatacaaatgactaacataaaaaaagtttgtcatcctaattatcagggaaatgcaaattaaaatgacagtgagatgccacttcatacctgttagaatggctactatcaaaatgataaaagataacaagtgttgaagaggatacagagaaaagggaaccctcgtacactgttggtggaaatgtaaattaatactattatgaaaaatagataaaagttactcaaaaaactaaaactagaattactatatgatccagcaatcccacttccttgtatatatccaaaggaatttaagtcaatatgctgaagagatatctccaggctcatgttcattgcagcattattcacaatacccaaatatgaaatcaacacaggtgtctatcaactgacaaatggatgaagaaaatgtagtgtatatatacaatggaatactactcagccttaataggaaggaaaacctgatatatgtgacaacatgaattaacccagaagatatcacgctaagtgaaataagccaggcacgaaaagacaaatatcacatgatctcactgatatgtggaatctgaaaaagttgaattcatagaagtagagaatggaatggtgattatcagaggctaggagttgggggtagacatggaaaaggtagatgttgataaaagggttcaaagtttcagttagacaaagtttcagtgaactattgcacagaatggtgactgtaataaataacaaggtattgtatgtttcaaaatgactaacagagtagattttaaatgttttcaccacaaaaaagatatgtatgtcaataagacagacctaatctttccacaatttaaacatgtatcaaaacattacattgtaccccatagatacaattattatttgtcaatttaaaatttttcactaatttatattgttattgttgcaccaactcctttccaccaggcagattctcataaagactattttctctcttacatgaagcatttcctacacacctcttaatcacggtagcattgacatcattccaccagattctatctccagtgttaaaataatcaagaacccagaaatctccaccagggggcaaccaatgcgtatcaaagtttcccactttcctttagatttacttatgggtaacttatgggaaaaaatacttaagtacttccctttttaaagaaaaaaattatatgaattctacaaaattatggcagaaaatttaagaagagcagatgcttcccaactcattctaaagggccagcattaccctgattctgaaatgaaaaagctttacaaaatccaagatccattcctgactaaagataaaagaaattttcagcaaactgtgaatacagaaaactttctcagcctgttaaagagtacctatgaaaaaaattatagctaacattatacttaatgatgaaatatttaatatatttcataacaggaacaagtcaaagatgtctgctctaactaattctactcagcattcaacaaaatgaatatagtgaattcatactagaattttaaaagcaaatgtctttattcactgacaacataatcatctataaagaaaatcctacataacctataaaaaactgatggaactaataagttttgcaagtttacaggatataatgtcaaacaaagatctattatgtgcccataagctaagaataaacaattgtaaattgaaataaaaatgtcacttaaaagggcatcagaaatataaaacttagagataaatataaagtacatatgcataaagtacctgttcaccaaaaactacaaaacattgctgaaagaaattaaatgggcataatatagatgtagagatgtgttgaatttatgactcattttgaacaaggaatatattcatcatatattcatcagataagaattatgttacaggtctaataacattcaaatcaatacataatgtctcatagttcctgaatctaaaatatcaaagaaagaaacataaagccatatcatgtttaacgagaagggcttattatatcatttatgagatcctcttgtaaatcactagctgtttgcatactctctttattgctgccttcatctccttattcctgaatgtatagacaactggattcagaaaaggagtgagaactgcatcaaaaatagccagaaacttgtccatctgtgaattagggtgtggccgtgtatacacaaacatgggtggaccaaagaacaaaaggaccactgtgctgtgagctgaaagagtggaaagggccttggatgaaccacctgaggaatgtttccaaacagtaaacaggatgaagacgtaggagattagaagtatgaagaaagtacccacacagataaacccactgttaacagtgaccatgaactgcaatctgtaggtgtcggtacaggctagtctgagaagccgaggaaggtcacagtagaagctgtccaacacattagggccacagaaggctaaattaacaagaaatgccagttggaacagggagtgactgacaccaagggtccaggcaacagccagaaatgaaaggcacattcttgggctcataatggtcagatagtggaggggcttacatagggccacatatctgtcaaaggccatggctatgagcagcaccatctccacaccaccaatgacgtggatgaagaagatttgagcgatgcagcctccaaaggagatgactttgcgctttctgaacaggtcataaatcatcttgggagaagtgacagagcaggctcctaagtcaatgaaggagagactggccagtagaaagtacatgggggagtgtaagtgagggtcagtggtcacagaaaacacaatgaggatgtttccagtaatgcttgccacatagagcacagaggaaaacactaggaggaggagctggatctcccatgaatgagtgagtcccagaaacaaaaactcagataccactgagtgattctctccatccattggtccagccaactgggctgtggctaaaattatgagaactaagaaaatggggaggaaattgtgattatgaagataataatatgtactaaaatcaatattgcaatgtcactatgaataaatagtatacagttattctgttcctcacatattaaaaacaaaaaatcaacataatattatcacaacatgtgagctgcaacctgatttaaacccatcatcaatactttcagtgtaatgtctgatctaaaattaacagattaggtaagaacaagattcctgactatccatgaaattcatcaggtgtttaaatgacctgtgatattaactattcctcatttccaacatattccatttgtacttatacatattcttataatttccttcccttcccagtttgcacccacaattctctgacagaaagtagacataagaggaaaacatgattaacagatggattatcactgcagtaagaggtgcctgggacggacttagttgaggtaggctgtggattgagagaatatagagactggggtatgtgaaatcggaaagcccacaactgtagcagactagagtaagtggactttcacaagaaatagaatcaccaccattatctaccacattttctcatgcttactgctatttaagtgcctcagtttctatacaatctttcacaattacgaagccctaaatggcttcccatcctgcaatgatttcataaggagcctatgccacctgtcatgtaaggctttttccatgcctaataaatatgttttggagggatttcaccagtgtttctgctaagatacatgcataaaatggccacagaggttgtgagaaatctctgcagtttctctttgtctatacacatgaaagtattgaagaccagcacttggattagttaagataatgttttaattcatcactgtctcctcctccccttggtaccagcttttatgttcattgcattccccacccctttaagtactcagtacctcctgcatggtaacctattctgatatttgatattatcatgcttaatttgactgaatccatttggatattttatctttaagaaatttgtagttttatacttttaatttatgataaaattagattaatatcaaacattaacaagtgacttttaggaaggtatatgagctttcttattgacttcaaactataaagtacaaactgtgacactagaaatttagtcctttaacacatattgtatttatatgtgaagtggagggtgagcagaaaacagtgttatatttctctgtgtccagatggatactcacctcaatcattttcctatagtagaaagtagttcctgaaaacacttaatagagattattttagaagttgctgaggtacaaataaaactgctatgctgacatcatacttttttgcaccaacaactccagttcttctgacacaaaggaccatcttcctagtgccataatttatcttagaccccaaaactcacagaggcacacatcatatctctaatacttgctcaccaccactggcatgagtctctctctatcctcttctacgtgaagtgattatactgtcacctctggagctaactgtccacagtctcaagatgcacacttttgacaaccagaagcctatggactgggtgagggagcagaaacagccacaggtactgcccatcagggtaatgtaagtcagcatgcaaacaactgatcagatgaacatgaatagcaaggtgctgaggcactgggaagagggaccggaaaactctataattgttgaaaaagactcaagcccttgggaagggaaatgcctatggaattatataaagaccattttatccaagttggtcatcattcagatgaaaaccatgaggcccagaaaagtaaactgagtttccagaattcacacaattgatagaataggaaccagaattcaggcctcttgcttcctattccagaaagacaaattgcaataataatcaaataatatgagcaatcatccagtaaaaataatctggtaaaaacagcaaaactcaaaagagtgatttttcctggttaagaccaaaactaaccatagattgctatacatagtatctattataaatactgaattatatagcagcctgacaataaatacataaaatgtgtacacaaagattattgaacctgtacaatacagtagtaaatagtaactttatatttgcaaagtgactgatcattactatcagaatttgtttacccattcttcatattttgttggtcatataaccagttactacaactgcaaaaacaacctaaggtcatgtttctgtgaagtccatccttttggtctttaaattttattatcctcaaaggtcaattatgatctcaatcttttcttgtaattttactgacaattctccttcacactgattagttctttctctaattcctgtaaatggaaagaaccaaaaaaagttgaaaaaacatgtattgtacatataacaaacaatcatatgtggtatacaatatatatcaaatgagtattaagataaacattcaaagagttttaaagaaaaaagtgttatagatattggagggcagaagatacaattgccattaagaacaggtggaggaggttatgccaaggacattgacctgaccctttaggaattagtgaaaattgaataggagaagaatgaggtacacaatgtgtgaaaaatacctaaattgatataacaggaggagaccttttcatatcaattatcattacttctgtgtatataaccatattagatacccacaaacaaatagaaagtggatagttcttgattgacaagtaggactaataatcccagatcatagtaaggtcttaacttcaagtcaataatctttattacttatggttcattcctctccctcatgttttccaataattttaaaatgcataattaaaacaattctcatttaaaaacatagtagccatgactaatgatcttccagtgggaaggtactaagactttacaacatgtttcttgctggggataagacagcctacagccagcattcaactcatttttctaaagtctatggatcaatttgaaatacagaaaaagcagaacagagataaagttaaaaaaagattaaaaatatgggaagaatgggagaaaggggaaattagaagatatgaacaatgatttaaaaataaaagagcctcaaaggagaagagaaactgctaagcaagactaaggtaggatgaaatacagtagtctctgtttctgagaacacaggttaaaaagaacataaataaaataaatttatcacctttaatacactcattcaaggatgctactgagtttgactctgggaatttctcacctttaacacactcatttggggatgctacggactttgacattgggttgcatttaaagggggagagaaagggcagttgcttctattatctgcccttttggactcacagagtttctttgaaaagcacagatgataataaatggaaatattgccttttatactatacaataatatacacatgcaattcactggaaaaagtatacttgttattatgatttgaggatactaccatatactaatcaagagaaacacatgtacagaacaaagaaggcacatgaaatttttactagtgtgtgttttccttgtgttctaccaccccaggagcagcttctgctactgaaggtcacagtagagttatttccaaaagttgtgggtctgcagggtggacttatcacatagctgtttgccaaaattcaaaagtccagaaaccatttccaaattttcacctcttttatcttcaaatcctaaaactatgaaaattcacaaacttagctccatacattatggtagaaaggttaataatttggactttgaggttgaccaggcctgatttttgaataaattcacaaacttacctccatacattatggtagaaaggtcaataatctggactttgaggtcgaccaggcctgatttttggatccaggctgcaacactcacttgctgtgttaacgtaacaaagttcctagaccatgctgagcttcagtttacttgttattgaattagggatatagcgttcgaaggaagaagttctagtatttgattgcacagcagagaaattatagttattgaactggggatatgtagatagacataataaattttagtattcaattgtacaatggagaaatcatagggaacaataatttattatatattctaaaatagctagcagagaaaaattataatgttcccaacacaaagaaaagataaatattcgaggtgatgaatatccaaattactctgatttgatcattacacattgtatacatgtatcaaaaatatcacatgtaccccaaaacatgtacaactatgatacatcaataaaaaacaacaaaaaaaccaaaagaatagaaatcaaaaataaatacataaatacataaaatagggataataatacctcccttgcttgcttgctcccttgctccatttgtaagaaataagtgatataatataggtaaaaatacttaacctcatacctaccacatagtatagcacaataaacgttatttattataatctgaggcctacctacataagtgactttcaagtatagaaaattatttctcaaattttaaatactccctgattctcaggtatggtaattagacctggctttaggtaaagctctcatgtctacacttggatttaatcacttaagtatatttcccagcaccccccccaaaaaaaaattgctcctaggtggacacactaatcaaagacttcctgagaaatgcaggaagaagttttgtcctctgaccacgctacgccctttccttgatggtaagccccataatctaaagccataagtttcaattcctcacataaaaagaaaaaaaatgtcttttatgaccacttcagataacactggatatttcccttgtcattaggaatgagaaatgggaggaaggtaaacttgtagacaggagaattggtagatgcttgaaaggatttctgaaaactgtgcctatccaggtgtacaaatgtgttgaccagccaaggcaaagcagtcaaaccatacaataccttatcctcaggaaaatggacttttctcccaaattgcctttttcatgaaaaatataaaattctccagtttcaacctcatgctaaatttcacatgtgaagaaaacagtcatgcacatcagaaaattaaatggcgagtcaagaccaaactcctagtcacagttatgttctgtttccagtattaccttctcacttattcattttgttaaagtggagccaaaatagaagtgggtgtcacacatcaagaaagactgaagtcgtacaaagccgatccttatccaacgtgcattaaaatatgcatcaggcatgtgtgatgcatatagtagaagtggaacaaatcaggccatgtgcagtggctcacgcctgtcagcccagcactttgggaggccaaagcaagcaaatcgcttgagatcagcagttcaagaagtgtaacaaatcctctacaatataagtagagtgaaaagagatagctacagtgatgagggaaggcactatagtgatgtggcatttgagtatagccataaaagaggataaatattacaatacaagaatatagggtctaaagaagtcttttcaagtagattgtaaaatatttcaaaaatggtaagtttggtgtatgttgaagcatacagattgtctacatcctaaaaatcattttggtgaagaaaggaaaataagaaaggtagtcaatattcatttgttgcctatcattagaaacttctcaaaggtatatgagaattattaaataaatttagggagccagtgaaggtatgggtcccgggaattgaggatgaagccagtaattagggaagatgccccatctataagtgcgatgtatcaaatggaggaaaagaaaaacggagggaaggagttcccttaagagaagattgaaatagagcagacttggggggctacacagaggaactgggactacacagttccagctttaaggctatagaaacagaaatagatatactggtaagtaaaaacccaaaggattggtgacttatcacagctggagtgaatacgaaggagcatgaactcaaagaaaatatcaagatttaagcaagaataaataggacaatggtaggtccatttttagaaattagaaagttgaacataaaatatgtcagggtggagaaaataatcacatgtattttaagcaaataagagtattagatattgagatgctcaggtgaaaacatatgacaggatatatgggggaaaagtacaaattcaacatgtaattgtatagtaatccatataaaaataatagacggatgtgtaagagtgcataaggtccctgaaggaaataatacacaggaaaaaaagattaaaaagcaaagacccaactatagaaactatccacattgattatgtaaagtaggaaaaggaatcaataaactagacagaacatcacagaggtaggaggacaagtgctggcctagaggagccaacacagaagcaggtatcaagaataaaggaggagaagagagaacaaagagagagaggagagaacttctgtggcagaagatcaagtgggatggtagaataaaggagaagaaatacaagaaaattgaaataaaatttacagaaatgttctacattgtcagtgggcagttttgacctggcacattgttggcacacattataaatgtcaaatgtattaatgaatgaatgaatggataatataatgaatgtgatggagttgtcaaaagctgaattaattaaaagtccccacgagaggttagatgacaaaattttcagaaactttccatgccactctgttgtgacatcaacagtgctggacccttgaaatcaaaccaaaaggattccaccatgagaatgaaaagggctgagaaggggaatgctgggtgacacagaaggtgacaaagggcgaaaggtttctaggcatttgatagactgatggacgtccgagctgaccataaggcacaggccacacaggaaggaaaatgagacccaacgcgaagaaaagtagggctaaacagtcgggaaaatgtgggaagaaggatgaatagtcatactatcaactcagattcctccctgacattcttctacagctttattctcgtcctttgggagccgagatgttcattttcctacactcttagctgcctacacacggcgacttttctccacggtgcctgatccctgctgcatcctccttctctagtggcaacagcaaatggccacacagaaggcagacattgcacccaactgaggagaatgtaattcactcattgccagtcacagaccttggctcaccgatttactaagtatagattttatttctatccctcacctacctgttttgccaagggaactaagaaaagagcatcatcaaaaattcagataggtatagttctcacaagatgaaccagatccagtacggcatcactgcagacatacacacagagctgcataaaacaggaagagagctgctaatcacagccccagagggtagtggccaaagtgatgccttggagatctgagaatgccagactgagatcacacggcctggggaattaccgcctatggtcattttggttttcccgggatggccaagcccagaaactgttaattgggtgaaataaagcatatttgattttcttatgacaaaaaaggccttttgccattgtctacagatgatactttaaatctttattttatgactaaaggtgaattccagagcaacattaaatgttgtccctttaaatttttaatcatttacataacgattaccataatattcaatttaaacataaaatgtaattgaaagtatgagattaatatgtggacatgaaatcatataatattccatggaaaaaacagaatgtataaggcaaagaggtttaaagtaacatcaaaactaacgctcactatacaaattctatgaaatcctcataattacactgtgaagcaggtgttgttagagccacataatctcaaacaaattatttattatctaaaattacatagatattaaaaggttaggccatatatgaatttaggattctctcaaaaattttttctctttctcctacatcaaacttccctaaattatagaaaagtcacaatgttaccaaacatattcacaaaacacatataatcttgaatccaaatttcagttacagcagaaaaaataaaactctagatcaatctcaatcgtgtaaataaattcagatttccaatctaagagtctcaatttgacatacttctttctctctcttctttcaaaccaggagaaatataaatatgagccacaaccttacaaaagctagaaaatatttacaattccacacaacaacacatgaagaaaaccttctggacatcaaaagtttaaactagtcaagactgaacaccaagataaagtgcatgcctctgaagagctctgagctagtcaagaagcccagaaatccctaaaagaggtgtgtatactgaggagtgaggatcaaaacctgtgatctttacttggaacagaaatattgcagcatgtgaaccctccacagagtgacagagggaaaggagtttaaagggaaacatgcaaatgtatcacctttggaataattaggacacgtgtgtggtgtaatgaaagaaggcaaaaagatggggaagaagccagacagatggcaattttcattctattatgaaaagaaaaggataagtcacaagtcacatgatgaaattaacaactatgaatccactctaagccatagtcaatcctatagcctaggagtcattctaacagatgagagtgttttggagacaagattccaaaactcgtctgccttccatcatacttactacccccagctcctcctccacaatatcctttcacaagtatctagaatattcaaagactaataatattatataattatttataataattgtattacaaaaataaaacttgatgacctttataaaaatactagaagaaaaagggaaaattacataaggtacagaacatacaaattataccatgaagcagtaaaaaataggatcaaattttctatgttttttaaaaatatgccttctctaaaatgttttctctctgaaatgatatttagaagacataattgaaaataaatacaaaataaagtgataaaaaataatctggcaaaattcaggatgtaatgagtaaagacaaccatgaaagaaatgaagatcaataaaagcaggaaaaaaagtgggaagtggagagaataatgctgctaaaaacacagataagaatataaatgacaggcttaaatatatcctgagcaaaacaaaatagaaaacacaagaaggtgaaatgtaacattaaagtcaggtccaacaaatgagaaattagtgtgaaagagctcacaatatctggttaaaaaattcaaagataaaagaaaacttttctgaaatgaagaaaacattgaatctaatggttaaagggcttatctttatccagaaaaaatatgttatagtatgaccacatcaaggcagatgcaactgaatttaccggacttcacaaacacaaaataaacaacccacaaaaaaaaaaaaaaaaaaatagagtccccatgaggctttaaggaagacaactattagaggccaggcgcaggggctaacacctacagtcccaacactttgaaaggccaaggcaggagaatcacttgagcccaggagttcaagataagaccagcctgggcaacatagcaagaccccatctctatcagaaaaacttaaaaaagaaaactatccactaaaaatgaatagagataacatgatacaagtgagcattctgaagcctaatatcaaaatgttctggggtttgcggttaaagaacagaatgcaaatgttacaaaccataactgtataaagactaattatattcataacaaaaataagaagagaaagatagtagaaatatattctggtccattcaactttcacagtgggagagaatcaacaaattatgttatgggtgattaaatattattttaaaagataaaggtcattattagaaaaattaaaaataacaaaatcaaataaagttgaatgacgaaggtgggagacgaaagtgggttaaaggggtaaagtggaactatattaaaagagtcaatggagagcgcccttggaaataacacgaaaattaaagaactaaatataatttatacagcacataactaaactataaatcttcaaattaaaagaaaataggtacatacaaaatatcacatagagagaaatattaataccatgaaaatgttaaaataaaagcataaaattaattcatttatttaccctattagtattttttgaacacctacgtgccaggtattgtgctgaatgccagtaagatatagttcctgcatcttggagttttcgtggaggagacagagattaatcaaacaattacacaaatgtaaaattgcaaccataaaaattactctgaaatacaatgaaaattactgtaagagagggatttgatgtgagtcagagaagtttcccctaagaaagcaacactgaagctgagatctaaagggtaaacagcagttaactgagtggagaacaaaggttttcctacagggggaacaatctgctccccgaggccagagtggggccttgggagttgtgcctgaaaccacattgtgaggaagtgaggggaagcattgtgcagataatgctgaaataagtagtggaagatgcttcctaagagaatgagaaatccaagactactaagcagaagaatgatttgaccagatttcacatttgtaaatatcactatggttacaatgtatagaatggattttaaggaattcaaattggatacaggtgagtcaattacaaagcaacatgcttgccaaggcaagaaatttgattacttaaactagatatgggagttttggaaataagtagataaatttgtcatatatttgagataataaatcaccatgacttgatggtagacttagttggagatgccctcactagtgcaccatctaatgcttcaagtctaataattattcaattcctccagagccaccaatccaatggttctaccatatttatgctgtcattcactttactgatatccttcttaccttacctcttttcccactttatattccatgatcaataccttgctccctcgtaatgattgtactcactcttccaaacaacaatcctgataaatcctactctctgccttctacatcttgataccacacagctatatgtggctagataaaacaatcacactgacaatcatcctatgctttctgaatccatcactcttctactttttcagatcttttctttctccctcatccttaccatgtgatgaactcattttgcatgtcaagggctaaaagttgaatattttaaaagttctcattttcccactactatataaaccaacaaatatctttagtctgcattcacaaataacataacaaatgagctcttcatatttctatctgtggtgaattaagatgactagaaattttgtggcaccatcctgttgaaaacgtggggacatattctttctccttgaacctgggtgggctctttgactgctttgaccaataaaatacagtgaaagtaaaacttccagttttgatgtccagatgttaaaagccttgaagcttccatttctacatcttggaaccaacgtgtgtggggtgctgagtcagtatcgaagaattctgcttattctgcttgcattagtccattttcatgctgctgataaagacatatccaagaccgggtaatttatgaataaaaagagtttcatggaatcacagttccatgtggatggggaggcctcacaatcatggcagaaggtgaaaagtatgcattacatgggagcagacaagagacaatgagagctgagtgaaaggggaagccccttgtaaagtcatgagctctcatgagacttattcacgaccataagaacagtatgggggagccaccccatcattcaattatctctcaccaggtccctccacaacacatgggaattatgggagctacaattcaagatgagatttgggaaaggacacagccaaaccacctcattctgcctctggcacctcccaaatctcatgtcctcacatttcaaaaccaatcatgccttcccaatagtccccaaaagtcttaactcacttcagcattaactcaaaagttggcagtccaaagtctcacctgagacagggcaagtctcttccacatataaacctgtaaaatcaaaagcaatttagttattttctagataagataggagtacaggcattgggtaaatgcagccgttccaaatggtaaaatttacccaaaacaaagggactaaaggctccaagcaagtccgaaatccagtgggacagtcaaatcttaaagctccaaaatgatctcctttgactctatgtctcacatccaggtcatactcatgcaagtggtgggttcccatggtctcaggcagctccacccctgtggttttgcaggggagagccttcctcccggttgctttcacaggctggcattgtatgcagcttttccaggcacacagtgcaagctgtcagtggatctatcattccggggtctggaggacagcagccctcttctcatagctccactaggcagtaccctagtggggactctgtgttgggggcttcaaccccacatttccattccccactgccttagcagaggttctccatgaagacctcacccctgcagcaaacttctgtctggagatccaggcatttccatacattctctgaaatctaggtggaggttcccatacctcgattctggacttccgtgaatccacaggctcaacaccacatggaagctgccaaagcttgaggcttgcaccctctgaagccatggcctgagctgtaccttgaccccttttagctgtggctggagcagctgggacacagagcaccaagtccctaggctgtacacaggcaaacagcagagtggccctgggcccagcctatgaaaccattttttcctcctaggcctctgggtgtgtgatggaaggggctgccacaaacatctctgacatggcctgaagacttagcgattaacatttggctccttgttacttatgcaaatttctgcagccagcttgaatttctcctcagaaaatggatttttcttttctatcacagtgtcatgcttcaaattttctgaacgtttatgctctgttttcctgttaaaactgagtgcttttaacacacccaagtcactcttgaatgctttgctgcttagaaatttcttctgccagataccctaactcatctccctcaagttcaaagttccacaaatctctagggcagggacaaaatgctgccagtctctctcgatagcaagagacacctttactgcagttcccagtgagttcctcatctccatctgagaccatctcagcctggatttcattgtgtatatcattatttgacattttagtcaaagccattcaacaagtctctaggaagttccaaactttcccacattttcctgtcgttttctgagccctccaaactgtttcaacccctgcctgttacccagttccaaagtcgcttccacatttttgggttatctttacaacagcaccccactctaccagtaccaatgtactgtattagtctgttttcatgctgctgataaagacatacctgagactgagtgatttataaagaaaaagacacttaatggactcacatttccaggtggatggggaggcctcacaatcatggtggaaggcaaaaggcacatctctacatgatggcagacaagacagaatgagagctaagtgaaaggggaacccccttataaaatcatcagctcttgtgagacttattcaagaccacgagaacagtatgggggaaatactcctgtgattcagttatctcccgttggatccctcccacaagacacggaaattatgggagctacaattcaagatgagatttgggtggggacacagccaaaccatattgctgctgaatagatcatgtagacaggctctcaaactacacggagagcaagagaggcccaccttaccacaacatttcatccaatccactaataaaacaggcacatcactgaagccaccttcaactctccagactacccagctgccagctgaataccacagatggctacagttaataccacacggagcagaatcatgtagctaagccctgcttgcactaatacaagtccacaattttttttaagtttgttgttttaagctgcgaagttttgaggtggtttgtggtacgtggaataagatgtcactctaatataatataaacttaaactatgtggcattggctttggaatcagacaatggatagaagccagaaggatttcacaaagactgttagtgaaaagtgaacagacttcaaggaaaatgatagcaaaacctgtaaaagcattctgggaactgacagtaaacactgaatggtccttaaggagactgaaaacttgaaagagcttaagaagtctactggaaagggctttaaggataatgagaaaaaatcatcagtggaggctgaggaaaacgcaccaaagtcgtattctgatgggagagttagaaaacgcttgcctggaatgatataaaatataggaaaaataccgaaaaagtttgtggatctggctggggagatttttggtgtcaactaaagaaaaaaattaagcttttaagaaattaaagttagatttatttaggggtctgagaacaagagactgaggattacagcctaggagaagtctttcagagaggttctgtcagactgctctggtgaaggtctttagcccacagtttatatgcaggctgtacatatacaccatggaatactatgccgccattaaaaaatgatatcatgtcttttgctggaatgtggatggaccttctattatccttagcaaactaatgcaggaacagaaaaccaaatacagcatactctcagttataagtgggagctaaatgatgagaactaatgaacacaaagaataaaacagaccctggggtctacttgagggtggagggtgagaaaaggaagagaagcagaaaagataactattgggtactaggtttaatacctgggtgatgaaataatctgtacaataaccccctgtgacaccagtttacctatgtaacaaatgcccctaaacttaaaataaaagttaaaaaaaaagaaaattaaaatctccttatcatctacctggtaatatgaaaaacacaaatctttcattcattcctttcaactgatgaggaaaatgaggcatcgggagttagtaaaagtccacattgagatatgagacccaccactggctggacgcagtggctcacacctgtaatcccagcactttgggaggccgatgctggtggaacacctaaggtcaggagttcgggaccaggctggccaacatggtgaaacccccatctctactaaaaatacaaaaattagctgggtgtggtggcaggcacctgtaataccagctactagggaggctgaggcaggagaatcgcttgaacccaggaggtggagtttacagtgagccaaaatcacgccattgcactccagcctgggcaacaagagcaagactctgtcggggaaaaaaaaaaaaaaaaaaaaaccaccaccatcattttgcaagtgttaccactattgtgtgttaatattgtagaagtattcctaattatgatttctttgtattcctaattgtaatagctttgtatttgaaaaattattgattcatactctatgtgttattattttgtatgtgatgacaacagaatatattatcatgctccttttgtgaatctcattcataatataaagtataaatttgtgattttgctttaatttgaaatattaatttcaaatatgttatcacaatttgatacaaactattgacagtaaatctgtggattaagtaatgtcttagtaggtattgggaaaatttgaaactagtaacatggaggactattgtcattgtttatttcaaagccagttaaaattctgcaaagcagtgtacataaaaataatttcaagaaatttataaaataccgagattatggtgtataaacaactttagattctttgtttaagaaattctgccagtttgtaatatatgcttcattcaaagtagctaagggctgtacctggctaatagtaggcacctaatatttgttgaaaaggaatactgagtagctgggacctcctgagtagctgggaccacacacatttaacctgtatttataaaattactgtttagagaataacatttgatggaatcatgcttttactttctgcttatgactcaattgtttgtagtgacattaacatcccaaatccttagcatggcctacaaggccctgagcaatgtggcacctgctgaagcctgctgcctcatttaataactctttgtctctttcccagatccagccactctaacattttttagctcctggaccaagacaagctcttcccagaacctgacctttgtacctgttctttattcctggagtatttttcccctgacaaattacttatcatctatcataattcaggttaaatggcactaactcagggaaggcttccctaactgcctcccttctccaaccaaattaggaacaattatatggccacacagtatcgaatcaagtttataattttaaaataattggaagattttgttgtttaacacttgttttcactataagactgtaattacatgcaagtaagaaccatgcctgtttgttcactcctgccacagtcagagtagtgcctggaatatgcagtaagggctgaacaaacactaaataaatgaacaagtgaataaatggatattgtctcatttttagaacagagtactgaatggatcatgaacactatctggtatgtcacgtaggtaatttacaagggctacaatttcagctcagatttaccttttcctggatacaggtcttgataggtctcttgatgtcatttcacttcagattcttctttagaaaacttggacaacagcatttgctgtcttgtccaaattgttactaagaatcaagagagatatctgacatgaaatgacattggaaaacattaaacacgattgaaataatgctagccaatatggttattattagaaaccaattacattttcaacttaaaaacagtaatacttattgcagactcaaatgtgcttattctaaaacaagtaaatgtttgcctatggtctgagattctaatccacggagttcattctaatccacattcaacactatcatgtaccagtgggcctcataacccacctagccctgtgatttttcaggttcacttttctaaacttgtgaattaaatatttattttcttagttcagaagaggaaaaaaactcttgtaattgttgcccatttcaggagaaatcttgcatatgaaaacaagagataaatatacacaactgagggctgtggtttaaacaaaatcttgagaatgttttttgaccttatacatttgtgctttagtataacaaaatgatatagacaaaggtaacttttaatagaaccagtcactaaattaaaaaaatgacaaattcttctgcttagctaagcaacagagaaggtaaaatactaattcaattcatcaatttaagcaatactcattaagagccaagtatgtgcttactgaataagctgctaaggtttggtggttacagagtgtgcggtgaaatgatgtctacatcacagtccaacattcacagagtttaaaagcctaccaagaatcaagacagacacaaatacctaacatagacgtttgtatatgataagagagccagagtacaatttaggagaagaaattgtatggaaggaaggttcatttccattagaccagaaaagacagcacatttgaaggcctgaataagaaatattctggataagatattgtggctgctaccagaatggctcttgatgatctctacctcttggtatttatacccttatataatctctttcctatagtgtaagctggtcccaggtacttgtttctattgaatagaatagaacaaaagaaatgagatgccacttctgagattagattataagatactgtgaatttcttcttgtgccctctccctctctctctttctcttgccctctcatttgaatgaagccaactggcatgctgtcagtggcccagtgtaagtcctgttacaagaaattgacgattacctgtagccaaccctaagtgaagaactgaggtcctcagtcctacaaatggagagaaactgaatctagctaagaaccatgtgagtgagctgggaagaagatccaccctcagttgaaatttaagatgacatattgagcagacatactgagacacactgaaagtaagagagcaggaggaaacaaaaccagggtcatacaaagaacacaactgattttgagattctcacataagtattacaccttcagtgagcacgtgtactagaaatttaaaaaataaataaaataaaccttcaaagtgagctagcaaataaatatccctatggtctcagctctgagtggagagagaaaatgttccctgtggagtttatagccagaatccagctctcaaacaggtttcagcctgaactcacacaatctgtgtggcttccaaatttgcaagctgagaatttaattcaaagtggtctcaggttgatagcagtccaaaatgctaggtaggaaaaaaaatcctctctggacaaataaatcatcaaagcaagctcataagagcaggtttcaaaggtcatgagcttctaacacacacacaaaaatcacacacacaaaatgggggtagcagcaacatgggtagcgtattcaaacttgaaaagactttaaatatttgtattattagatgtagattatgaaacacatattttaatgtggttaatttttttaaggaatcaaaactatgagtaaagaccaagaaaattgtgctggatggccacttccaccatggctcccctcctatttaagtctgggtactgtgtcacccgaagtcttcaggcacattgttccaggtttgggtttgcctatgaaagaaactcatgagagctggaaatgaggagtgaagaggaggtcttcacataaagcaggcttaaggattagacatagtaggtttgacagatgtgatggcttgcagaatcctttatgagctcccactgtccatctggataagatttacagacctttcagaaattcctataagcttgggttctgtgcccacactctagactgtcaggctaagatctctgatataaaacagacctcttctgattttgtctagctgcttttctaatatctattcaccaagctcttccaataatagcataaggccctaattaatattaaacttttatcattataatacataggatgtcttctgttttcctgatcaaattctgactactattaaaatataaagaattgtccagaaatatataaaaaaagaatcacacattgatcttctttaaatgaaaatataacaattgtatggactaggatgattacagttgttcagttctgactgttatttgaagaaaaaagcaataagaagcctcagcaacttaacagaaggagctgccatttactaggagaaaagattgtggatgagagtgtagcaaaggtcagaattctgtgaagcttgagatgtttattataatgaattatcttttatactcactacagtttcctaacaattttggggtttatatttttgaaagagatatacctttaatttcctttctttgtactattgttaggtaactttaatgtgcagattatactacagtgaaagttgccaatgacaaggcaaagtcacttacatcagacccaaagcaaagtggagccgggtcatgaaaaaggggatcttgtgtgtgtgtccacgataagcactatcacaaggactttctataaactcacaagaaatttctgcccacccagcacactctgtttgtccagctcatcctgtaggtgtctctataataggacctatcataaaaaattcctcaagactgcagcatttcagataagccaccctcacaagaacacttgcctagcaatggctgtttctgccagtaagttaacaccagctcctgcatcagaccctgtgaccaatgatgtttgtttcaaaacagcttgcatggacttctttttgtctttatatattttccttacctcaacctcttgggatgcacctatgattgatcatagcacaaatatctcagattataatccttgtttatttccaaataaatttatttctttggagttccactttttctgttattatacattgacattgttattatgaaattggttgggtgatgtgtcttattttcttgtctccggaagaatttctgtaacagtgcaattaaacgttctttgcatgtttgctagaactcacctgtaaaattgtctgagcaaccaaagcctggtttttgtgtttagtttttcttttgtgattggggaggggggtttatcgtactgattcaaggtgtgaaggtaacatcattttgattttatacatcttcttcagtccatttaagcatgttacatagcgttgtttgttcttttcatgatattctttacagtagtctcctaaatgttccctctgcttctgccaggagcccctacaatcaactcagaagctatagagtttaaaacatgtaacatattatgccacctttcttactgtaaaacatcccatggtttctcatagtatttatagtaaaagtgaaatttttatgatggcttgagaaacttttcccattagatgcccaagtgctggtctggtctgatcttctcatcttcccttgggtgattctgtggcagtcacactaccctccttgctgctccacaaaaactccagcatgatcctacttcaggatatttgccattgttactgcatctgcctggaaccttttctcccatataaacatagagattgctcttgcctgtccttcaagtctattcttaaatgtcccattctctgtgaagctttcctgcccaccctatttaaattacagacttcactcccaattccccatctactttaagagtcttcatttatcattccttgacaaactgtaaatatacatgttcacttttttatcgtctgtctccaaatactggaatgttaagttctgtaatgtcagatatttctgtttggttcactggtgtattcttaaagcatgttacatactaggtatactcaatgaatatttgttgaataaatatcacattgggcttattccagaaattcaagcttgtttcaatagttagagcaatctacaaatgtaattcattacattaactaattaaaggagctaaatcacatcaccaccacaataatgcagaaaaccacatttgatacaactcaatattcatgtctgcctaacaaacatctcatgatactaggaaaagaggaagggatatattattttcatgtataaagcactaaccattgtagcatgccaatatactcaaaattcaatgaaattcctatcaaaatcttagcattcctcttagtcctcaacaaagcatttctaaaatgtgtatagaagaccaaagggccaaaagagtcaacttctgaagaagcgcaaaaagaaagttgaggaaatcttaaaacatgttattgagcttaaagttgcaaaaataaactcatgtaccataactgatgagtagaaaaatagactagtggaataacataaaaataaaaacaatgcttacataaaatgttgtaactgatttggatgtcattagaaatcagtaagtaaatagatggacaatgtaatgaaagatgctaggcaaataatgtggtagggagaataatggccctcaaagatgcccatgcctaaccctggaacctgtgaatatgttacaccgaatgcaataaaggcttatcagatgtgattaaggatgcaaactgagatggagagatcttcctgggttacccagatgggcccagtctaatcacatgagttcttaaaaatggagaacctttcttagctgagtccagagagagatgtgacaatgaaagaatggtcagagaaatgtgacattgccagctttaaaaagagagaggagaggcaatgagaaaaggaatgctgatgttctctagaagatagaaaaggccaggatatggattctaccctagccgccataaagaaacatgcctgtcgacaacttgattttagttcactaaaattcatgcctgatttctgacttgtgtacactgtaagatgacaagtttgtgttattttaggtcacttagtttgtagaaatttgttacagcagtaatagaacaagtggttatccatatgaggcaaattagattggatacctatctccaatagaaatcaattcaaggtgaattccaggaaaatacttaaaacatttagattaaaaataaatgagaatttttgttactttttgtaggtcatagaaccaagaaaaacaaacattaaggaggaaaaatgaacatatgactacatcaaaatataaagcttctctatttggatgatatcataaggtgacaaatcataaactgtaatatttacaacatatatatgagtgaataaatatacatttagaatatatatgaactcccaaaaatcaacaggaaaaataagacacagaacaagcaaaatgcataaacgaaagaagtcaaaagaaaaataatgactcataattatatgaaaagaagctcatcttcatagatgagcagataaatgcaaattaaaaccaccctgagatgctttttacatccatgagcctgataaaagttagagtctaaaagtaataattaacaaagatgggaagtaacagaaaatcttgtccattactggttaaagtataaactgatacagctactttatagaatattacattatagaataaagttgtaagtatgtatatgcagtgactcagcatattcattgctagtatgtactcaagagaaacttacaggagtggactaggaagtaaatacaaaatgattacaacattgtttgttatatcaaaaaataaaaaagacacccaattttccagcaaaaaaaataagtaaaaataaatcctggtgtattctaacaatggaataatatatagccattaaaataaatcaactattactgtacatatgaatgtaagtatcagcaaaacatattgtttagtgaaaaactaagaagctgaagaagaatatatacaatatggttacatttatatgaagtccaaaaacttgcaaaataaagaaatgtgtttagaaatagattcacatgtgagaaaactagaagaaaattaatgaaaggataagagggatagcagtaattctgagtagttgagggaatttcaattggaaaaaaataatatcatattctttaagtcaggtagtgggtattagcatttgttttaccatcgttctttattcttatagctacactatatattttcaatgtatttaatgtattttttgcataattaaatattatgcaataaaaatgagaaaacaaaaaagtagaaaatgataaattacaataaagaaatggagaaaaaattataatctagttgagtaatggtatattacatagctattttcttaagtagatgtatgtacatgatgtatgcacgattgtacatacatgttcttaattatatataaatatatatgtacatatttttaatataaaatactaaacaaagtacaccaaaatattagctcctatgttagtgagataatgttttgtttttttgtattttaagttttacatagtaggtgtatttttctgttttcatactgctataaagaactgcccaagactgggtaatttataaaggaaagaagtttaattggctcacagttcagcacagcttgggaggcctcaggaaatctacaatcatggcggaagacaaagaggaagcaagccagcttcttcgcaaggcagcatgaagaagtgccgagcaaaggggaaagaatcccttataaaaccatcaaatctcgtgagaactcactatcacaagaacagcacacgggaaactgcccccatgattcaattacctccacctggtctctcccttgacctgtggggattatgggggctatggggattacaattcaagatgagattcaggtggggatacaaagcctaaccatatcagtaggcatgtattgaattttaaactcagagaaaaatactagtgtttttataggattcttactaaataaaaaccagaaagtagtaaaccatctacgctaagacataaaattcagttgtttagttacaagatagaatgtggccttgtaagaaagcaaattaacttctaacatacaaagccttagagaagattcaagtgactgacggatcttaaacagagctattattacaacttgaactgcagtaaaatatcctcagcaacatagattgtgtgtttcactagtcagagcaatacaaatttaatgaaactccattggtggtgtttttaatcagacaatttctgaagatgtcctggcttattcacagatgcaagccaaatctctagaagagtaccataataagaaaaaaaagaatacaggcaattgagagctgttccaaagtttagggagtttttgtaaggaattaataaataaaaatgttcttgaaagagagaaattaatatgcagttcatactgccagaattgcaggcaatttatcaaagtcccctaatcctccaaaatcgctattttttttttgacacacactttacagtacagaagaaaatgtctccggcaatgaatcacaaagttaaaattacctagtctacaattaactagacagtgatggtaaatcattttctaccaaaagaaagaaatgtcttgtctattcaggttctgctctacttaaaagttttccttgttggcgagcaagtggttagaaaatcatattttatacctacattcagcttaactatcattcagctcaggaagatgactcagggccttatccataccttcaagtttgctcttagcaagtaattgtttcagtatctatatcaaaaatggcttaagcctgcaacatgtttctgaatgattaacaaggtgatagtcagttcttcattgaatcctggatgctttatttttcttaacaagaggaattcatatggatcagctagaaaaaaattaagaggaaaatcacatggaaagttatatattatatatctattatatatattatatatctattatatattatatattgtatatctattacatatataatattatatatgtattatatatattatatattatatatctattatatatataatattatatattatatatcatttccaaattccccagcgttcatatttgtcagtgcaagtaaagagccttactgctgatgaggtttgaggtatgaccatttggccagaatttatgaactctacatgtcgcttgatgtgtgcttcagggtacacttttttttttttttttgagacggagtcttgctctgtcgcccaggctggagtgcagcggtgcgatctcagctcaccgcaagctccgtctccctggttcacgccattctcctgcctgagcctcctgaatagctgggactacaggcgcccgccactatgccctgctaattttttgtatttttagtacagacggggtttcaccgtgttagccaggatggtctcgatctcctgacctcgtgatccacccgcctcggcctcccaaagtgctggaattacaggtgtgagccaccacgcccggccagggtacacttttaagcagagacactactttgaaggtcataaaaaatataataagagataaggctaatttgctttaataataataaaatcctttaataaaaatataaaggaataatataataattttctttaataaaatataataagagataaggctaatttcctttaataaaatatagtaactacataccaacagaattccaaaaaaagaaatggagaggaagggagcatgggtcattaatcttgtcaaaaatataaaattatatacgaggaattcctagaaactgttttccttgtctgcggccattgtgctgctgctacacaactactgcaagcagcccttcaagccctcctcccagtacaaagctaattgacttgtgagaaatgttaagcttggaagagtcagcatcgctgcacttattttttattctactctgacattagaataatccttgagtgggggaaaggttaaaaacccccctggataagtgttactaattaatgatgattgttttaaacaatgtttggataatttttccttgtcccttgacataaacttgataaataactgagaagtgagaaggagattagtgggttgattaaattccattcaggtacttaaagttagctccaaaaatttagctatttataaattgtcatgcattgttaatgtataagagatgtagatttcatttatctttggtggagcgagatgaagcagtgaatcattgaagactgaaagaaagaaaaaggtcttttcccttttctttaagaagcatcattagttaaaaacatgttagttgataccagagaactatatttaaagggacagcaataagcaaattgattactctggtgattattggagtgacattgccttttagttgtactttcacaaaattcacaatatttgccaaagtcaagttatccattacactattaatttgtcattcttttgtttatatagtcaatatctctatctcaattggatctatctcaactgcttctaaacaagccaccacagtctctcccatttcaacaatctcttccaagtaccatttcatttcttcttttcatatttttgaaaacttttgaaaaactacctattttcctcctccatttcttgttcattccattctagtggacatggaatctgttcctcctccaaaacggaatttggtaacccttaaattactaaacccaaaacaatatgttgtctttatctttacctctctgtggcatttaatgataagaccactactttcttctcttttacccttctttcttgaattcagtcaaacaacgtacttacatttttcgtcttattctccatcttagaaaccacctcagctttctccattcagctataaaattgtgcttttcctcaaagattaatctgcctctcctctcactctatactatctctgttagctaattttatttgtgcacattgcttatactgggcattatatacacatatgcatgtgtgtacatgtgcacacacacagtgtatgtggacatgtatatatatgtgtgtgtgtgtatatatacagcatatatataaattacaataacataaaggtggcattttaaattagtggaaattaccctgatttgatcactacacattctatacatgtaaagaaaatatcactctgtatcccaagaatatgtacaattatggtttgtcaaatgaaaaagttcatacattgaaaaattttagataaatatcaaactttctctgaaactgtaactgtaaaatgtaaaaaacagtaattgctatattgcttatttctgagtagaagaatatgagacatttccctaatcattatgtgtaattacaattacatatatatatgtaattgtaattacacataatggttagggaaatgtctcatattctatatatatagacagaaagagagaaaatatatgagggagagaaggaatctttccatctcctttgagttccacggtgttgagagtcaggacaactgcaattgcttcatcatgcctgcttgcaattatagggcttttgaaccatttgttccctccttagatatcctcatttttttcagattcttgcttagaagtcactcctccatggacctcctctgacatattaaacattgcagtccattataagctgcaagaggacagggatttttgcctgttttattccctactgtatcaccaggggctacagcaatatctgacaaacagtgggcatgtaatgaatatttgttaagtgaagtaataaattcaatcaaatcacatcacctgtttaaagcacttcattggcttcacattgcacttagaataaagagaaattctttttatacaatatacaatatattttatacaatataagttcctgcagaatgcagacactttctacttctccagcctctttttgactcctctcctactagcttctgtatttaagccacattagacctttcttcagttttttatatagactttgtcgcatcacacctcagagattctgtacatgttcttcctcctgcctagaaaggatcgtccctccactttcgccaactaatccctgctcaacttttcatctcagcaggaagcccattctctttggcaatcctctggcctccagcccatttattatatgctcacatgtcaacatgtacttcgtacagcatgtaacacaattgcacttttatattttaacaaattatatttcccatattgaactgtaagtctcctgaaagcaggaattttgttcttgctcatcatcaactttttcaacatccagtgcaccatttagaacttagatgtagtcaatacaggtttgtggaatgaaagaggaaaagaaagaattaatattcctttaaattaggatggcaaagatcgtatatagaaaattggctaagttgtggtccattcatgtttgctcccaattaaggagcacagctatgaaaaggaaggcttcaaattaataaccaatagatttttttaaaaagaaaactggccaggtactgtggcttatgtctgtaatatcagcatgttgggaggccaaggcaggattacttgagcccagaaattccagaccagcctgagaatttggcaaaactctgtctctacaaaaaatacaaaaattagccaagtttggtggcatgtgcctgtagtaccagctacttgggaggctgaggtggaagaatagcttgagtctgggaggtcaaggctgcaatgagctgtgattgcaccactgcactcaagcctgggtggtagagtaagaccctgtctcaaaaaaaaaaaaaaaaagaaaaatcactaagcaaaataagacatgtgaaggatcatgtcaaaggtaagaaaaattaggggaacattaaaagctttcttcccaagccactaaatcaacttgactaacaaaattaccacttgatttagtattagaaaattacattacatatcaaacataaacccattaatcaaatactaaagaaatttctgagttaaatggtataatgttagcttatgccagagctgaccttgaaagattgttcaaatatggctcagtgtgattgaaagttctgtgtgaatatgtttttggaaagatccaacagcaacaccttagtgtatgtttttgaaataaaatgtatctgagtagcagcaaagttattctcaaatttccattttatagctggagatgttataccgtgacgtatatgataggacccaatatggatcaatcccttttagaagtcaatcaggaagaggggagcagttaaaacagttgcttggtttacaaacattagaacaattttcttattcacaccatctgattattgtattttattttttccccaacgtttagactacacaatgagttaagaatgataaaaataaggtcaccaatatattatgtacatatttaccaaaatctgtgcatgcttatacatataaacacagctgataatttattacttaggctcatttgtaatttttgtcactatagaccagttttttatttaaattgatgattagtatacattttaaatgattagtcaaaataaaaaatctaaaatgtgctctaaatacctcttaggtcagaaaaaaaaagtcaaaagctagagtatagagaaattaagaaacgccctaaatttctaatctgacaaaaattcatacaagatttaaatattttaatggaaaatagaacagaactaattattgaagaaattatagaaaggaaacaaaataaacagattatatggaggatttttagaagataagtaaataaattaatatactaggaaaaaacaagggaaatataattgataaataaatacaggtaagagttcttttgaaataacgataaaatagaaaatctctgtcaaaactaaaaggaaagatgcataaatatataaataaatgataaaaaatgttgcatacatatatgactttttcagaatcaaaaaatttaaatttctgtaataaaatttaaatgtttataaatttaaaaaactagaagaaagaatgttgactgttcacaatacaaataaatgacaaatatttgaggtgatggatatgctaattatccttatttgatcattgggcattgtatacatgtatcaaaatatcactctgtatcccatgaatatgtacaattatttgtctcaaaaacaaacaaaaaaaagataatgggagaatgttgaaaactcagagagaagagcaactctcacagatagggatccagataacattagcagctgatttctcggcagaaaccttgaaggccagtaggcagtggattatatatttaaaataatgaagaaacctgtcaattgagaaatatatagctggaaaacttatccttcaaaaatgaaggagaaattaagacatttccggatttttttttaaaactgaaaaaaatccatttatccctgaatttgccattcaggaagtgttaagtccttcaggttgaaataaatgaactctaggcaataactatataagtaaataagcaagctgtatgaatatacaaagctctctggtaaaggtaaatacataaacaaacataaaaacagtcctattgtaattttggtttgtaactctgctttttattttctacataatttaaaaggcaaatgcataaaatgtaattgtaaatctgttagctggtatacaatgaataaagatataatttgtcacatcaataacataaaaagagtagagctatatatatagcagtagaattttggtatgtgattgaacttaagttgaaataaattcaaattaaaatgttataactctaggatgttatatgtaattctcatagtaaccaaaaatgaaatatacatagaatataaacaaaaggaaatgagactagaaacaaaatgtgtcactacaaaaaaatcaactaaagataaaaaagaaataattgagaaaatgattggcaaaaatcagtaactctgacgtattaaaactttccatgctacataaatctgaaaactctatttcacataaaactggagctgaaagaaacaaatatttacctataaagttaaaagttatatagggaacaaacactaattttttttagaaaaaattataaaaagagtaaaaatatgccttatactaccgtaatttcatgttttacagctctgggaaaatagcaaataaaatgttctgttagcatgaatccctctgtgcccccaaaaaaccctatggattgcatcattattacctaaaaagtctattctcaaatgcagcagagtgatattttttacaaggtagatattaattttagatatggaataatattggtgatttcaattttataacactgggttaagatgaaagaatgagaagataaaggtccctcagcaatataactcacaaacatgttcagaagcagtaagaagttacattaattatcttttgaaagtcgataatctacatctttaatgtatgcatatagcatagctaatgtactatccctgggtccatttattcaatgaataattgccactatgtgtcagacatttttctaggcctaggaatggatacataagtgaacaaagcaaagattctggttcttgtagagtttccattaaaagacaatttagtaaaacttttcttcccccaaattataaaatctgtaagatgatttaacaacatgtgtaaaagtcattgtgggccaggcacggtggctcataccaggtgtggtgactcatagcactctgtcacccaggctggagtgcagtggcacaatctctgctcactgcaacctctgcctcctgggtacaagcgattctcctgcctcagctttctgagtagcaaggactacaggtgcacaccatcacgcctggctaatttttgtactattagtacagacggagtttcaccatgtcggccaggctggtctcaaactcctgacctcaaatgatccgcccacctcggcctcccaaagtgctggaattacagatgtgagccacaatgcccggccttattttctacaactttggtaactttagcatataccccaaatctgtaagacataatattataattcaaatgcaactcatggcttctctttgtactctttctctagcttttgaattatttattctaataccagttttaattctgacacaaaatcatgggagttctaatcaaaatccaaccttttatcataaaaactatgaagaaattatgagtagaatttaaaaaggaaaataggcctattaattagatttgtctttgtagcatttaactctataataaataatattttatgcctatgagtccccaacaaagcctccagcttctatttagatataaactgtaaaagtcactactggatccacaagcaagactatggtaaataaatttctccacctaaccagcttcttttacatgatgttacatgtttcttttgttttttcattttggcaaatattgattgtcatcttcgtgtttgtctgtgtcctaagtgctgggatacagaatctgaaaagatggacacaggacctgccttcaagttcacccccttttttttttttttttgagatgcagttttgctcttgtcacccaggctggagtgtaatggtgagatctctgctcactgcaacctccacctccagggttcaagtgattctcctgcctcagcctcccaagtagctgggattacaggtcccagccaccacgcctagctaatttttgtatttttagtagagacagcgtttcatcatgttggtcaggctggtctcgaactcctaacctcaggtagtcgacccacctcggcctcccacagtgctgagattacaggcatgagccaccacgccctgctaggagttcacgctttagttggggaaaatatacaataagcaagccagtttttaaaatgagaactgcaattagagttaaatgctacaaagacaaactcacaggaagacgggatgtagaatgataaggctctcagaatagtaagagaaactattgcttcttacgatgtttgtctttctttgtatcggtgctcagctgagtctgcagtgcttcagaggcagctttcattttataaaaatctatgatttctccttccagttgttttttctcttcctcgagcttccttatctcctcctgttgaatcattttaagatgctcgaacttgtcctgcagctgtgaaaccaatgtgcagttgtgacaccaaagcagtgtggctgaacacctaaaagaatacgctttttttctgattatcaaacaaacccaaatcatcacagtagagcacgatcttaataacaatctcaaaaactcaggagtaaacactcagatatggaatttttcttttctttcttttttccttttataagatggagtctcactctgttgcccaggctggagtgcactggtgcgatctcagctcactgcaacctccatctcccagttcaagtgattctcctgcctcagcctcttgagtagctgggactataggcatgcaccaccactacaggcgtgtgccaccacacctggctaatttttgtatttttagtagagatggggttttgccatgatggccaggctggtctcgaactcctgacctcaggtgatccactgaccttggcctcccaaagtgctgggattacaggtgtgagccaccatgcctagccaagaaacccttattttaaaacaagccaggcgcggtggctcatgcctataatcccagcactttgggaagccaaggcgggtggatcacttgatgtcagtagtttgagaccagcctgggcaacatgttgtaaccccatctctactaaaaatatattttaaaaattagctgggcatggtggtgggcacctgtaatcccagcttctcaggaggctgaggcaggagaaccacttgaacctgggaggtggaggttgcagtgagcggagatcacgccactgcactctagcctgggtgacaatagaaagactccatctcaaaaacaaaacaaaacaaaacaaaacaaaaaaccacaaaaaaaaagactccatttcaaaaacaaaactaaaaccaaaaacacaacacaaatgtagtacacaaatgaaaataattagtgtgttaaatacagtttcatagaaaataaaagaccaatcaaatacaataagctgcctttttagatgggtatgttattcttctttcacagctaaagaaacaggctcagagaatgttacttgattggaccgtgttgcatttctggacagtgcagttgagatcagactttgtgtgtaactccactagcctaccagggtgcctctcataaaggtaagaaatgtaaatctggcctaatatacaaagttgccagggcagcactgggtcaattctacatacagtactcctatgttcatcaagggaaaccttaagggaaaatgaaaatgtttctagaaggcgactggacaccagcgcctttgcttgttgcctttgggctcttcttctaaggccaacagtgatctgaaattattgactggcttttccaatcaagtggacaaaatggtaccaaggtcgccaacatcgatgtagaacattgatgttctacaacattgcttaacgcaaggggagacgctcctgactcagagtgtttaattgctcacctacttctttttctgccctcttgggcttctgaaatgaaaagaaccctggggtgatacagtgagtcaaaggggtgccagccgcatcacagcaaaatagattcctaaaaaatccctggcctaagatgacagccttgcctggatcagtttgaatgtgctgatagtggacatggtagaatgaaggtggttgaaatgttcatattaaagaacttccacccagattgcaagaaaagagagaggaatggagatggcagcacgagcccctacaataaaagcagatgttttgagatcagttatatttcttctgacaaaaattaaagatagaaaccaaagtttagcctgagactacaattaactgggcaataagccagaggcacatatggcatagacagatttaaacatttctccctgatattaatacaaacactaaaattacaaatgcatggattccaaataaaacaaatatttaaaaaatttaatgaataaaaactggggtctacagtagtatttgaaggagatctcacaaacaggtttggtttttgaaggttagaactggtggtttagagaattcatttcattccagagaaagaaagagaggaatttcttgggttccttcaggaatgcatctagctttgcctcatctttgtttgaactatggatacggcagaagaaaacaggaggatttcacagatttaaggtacaaaaagtcactgggttctctaagaagtctgggattcttctgctggaaaaataagtttgttgagaaaaaatgagttggaggaagctgttattgaagtgaagcagaattgtttttactaatctgcttattacccactctgtagtgtggaaacaaattattcatgcacaaggtcctcttactgttcctagaatgcagtggaaagagaacagattagttttcctccctcagaacacaatccctagaaacaacctacctcagatgagatattgcctaattattttcaaaagacagtgaaacatcatggatgtaaatgtttgctgcaaaataaatacatgctagaaacagaagcatctgggtcacagctatattagagctacctgtgttcccctgtcactgacattaaaacaaaaatgtccaatacaatcattcacagcgtgggagaggggaagttgaaggatggaaaggccaggcataaaaggatttcagaatttccgtccataaggaagtggctttgtgcactgtctgttactgtgtgcaaggtgaaatttgaagaatgaaaacgtgcagtaacaagggctcctttgtccaactcacctctccagataccaagtttcagacatgttgcattttaattgaaaggttgatataattttttttaaagaacacttgcggtgtttgaagtgacaaaggctgctgtgacaaaaaagcagggaaagggaatttttttttaaaagcaaacaacaacaacaaaaaccccacagaaaagcaaacaacaaacaaacaaaaaacagaggaagaagtcaaacaccctgggctgtgactacttccaggaaggggctacaagaggcagttggaaattctatttgttttgcaactgtgggttttctggcccgcttcctttctaaagtatattactctgcttttggttcatgaagttatccatttctgttttctggaacagctatgtattttctttatctatcatctatctatctatttaccatctatcttttctacctttcgctatcaagagcttgggtcaagcaggatagaattccagtgtatgttcactctaccatttaaaacaagagctcttgtaggcattctccatcacatcataaacctgagctttctaaaacagggtgtggcaaactaccatgcatggaccatgtctgacacagtctgcgtttgtaagtaaagttgtaataggacacagccaatacatgtgttacataatgtctctggctactttcatggtataatggaagagctgagtcattgagagagagaccatatggcttggaaaacttaaaatatttaacatttagcctcctgcagaaaatacttgctgactcttgtttgaaaagatctctgtttagaatgctacctattgcgttctggatagaatcacaactctttaccacaatcgacacagcttcagccctgcttctatatccagcctcatctatttctgctcctcctccttattttccttctggccatgctgatggattgtcagcttcccagatgtgtgagaatctctcctcccttcctaacattctcatgctctccctctgcctctcaagaacttcctgccccatctctcatgacaaatcctttctacattctttaagatgcagcccttttgctccttccttaaggatgtcttgtctggctctattttgggtgacgtgctccttctgcatctcccagagccagcctgtgtgtgtcagctacaacatttctttgcatctctgtgtcatatattaccaaatctgcctaagcttgcatgagtcactgcatgacaacttcagactccaccagcattgtccccactaaccacaaggcttagacattcgtccagtatgctcggggttgtggggtggtagcagtaaccagctggtgaccatcatttcttacatcagaatcaaatctgtagatctctgccattcataagtatttggagtttaaaattagcataaagattttccttaaaataagaagaaatgccttgagtaggcttttggaacataggatgtttccactggttcatttctgtgttcaatattcccacatgaatctaaacacgactctgctcttagtagctatgtgaccctgggaaagtcactcaatctccctcagctaaattttgttgtgtgagtaatgaggagacagttgtgatttgtatttagtgaataataacaaacaaaaggcatttagctttctggaacctggtatgtagtagaacctcatgaaatactagctctgttgataaaactagactgaaagaagctttcaaagtcaacaacagtttgaggcagtgaaggacgtagaggagaagctgctgctgcaggggcctgtagctcctggaagcccgttttgtccatgatttagcaggaatgcattacccttccatgacgaggcacagcccacagaaaccaaggccattctttgaagaaaaacatgtcttaatagcgtttacattatgtaacagtgtaatacaaataataatttattattagtaataatgtgaaattatttacagtaccgtaaccctaactctcacccctaatcctaaccctaaccctaacccctaaccctaatcctaacccaaaccctaaccctaacccaaccctaaccataacccaaccctaaccctaaccctagcccctaacccaaccctaacccaaacctaaccctagcccctaaacctaaacctaactcctaacccctaactcctaaccctaaccctaaccctaacccctaaccctaacccctaacccctatccctaacccctaacccctaaccccaaccccaaccctaaacccaaccccaaccccaacccgaccctgaccctgaccccgacccctaaccctaaaccctaacccctaaccctaaccctacccctagcccaaacccgaacccgaaccctcaccctaaccctaaaccacatgagcaatgtgggtattatattttgggtgtcatgtgtgcattaggaatgctgcatttgtgttccgacactgcagttggcccctgcaatgcagcccctcgccttgacttgggagaatctcggtgcgcaggattcagaggggcttttggtttcccgttttccacactgaaccgttctaactggtctctgaccttgattattaacggctgcaaccgggaaagattttattcaccgtcgatgcggccccgagttgtcccaaagccaggcagtgcccccaacgtctgtgcttaggagaatgctgctccacctttacggtgtcccccaggtctgtgctaagcagaacgcagctccgccctcgcggtgccctcagcccgcccgcccgggtctgacctgaggagaactctgctccgccttcgcagtaccactgaaatctgtgcagatgagaacgcagctccgccctcgcgatgctctccgcgtctgtgctgaggagaacccaactccgctctcgcaaaggcacggcgcgccggcgccggcgcagagaggagcggcgcgccggcgcaggagctgttcgggagacgcggcgcagggcatagacgcacgcctccgcgtccccggaggggaggggtcgctgggcgggcgggagtgaggcgcggcgcaggcgcaggcgcagagacgcacgtcgctgggctcagggtggcggggcgtgttgcaggtgtacagttgcacgccgccgggcggggagcgcgggaatggcgaggtgcaggcgcagagacacacgtccccggcggcgcagcgcacagacgggtggaacctgagtaatctgaaaagcccggttcgggtgtcccctgcttgtacccgggcactacaggacctgcttgcccacggtgctgtgccattgcgccccctgctggcgactagggcaacttcagggccctcttccttacagtggtgtccagcgcctcttgctggcgacggggcacggcagggctctcttgctcgcagtatactggcggcacgccgcctgctggcagctagggacattgcagggccctcttgctcacattgtagtggcagcacacccgcctgctggcagctggggacactgccgggccctcttgctccaagtgtagtggcggctgctcccctgctggcagctggggacactgccgggccctcttgcttgcagtgtagtcggggcacgccctcttctgtccgctgggggcactacaggatcctcttgctcagtgtagtggcagcacgccccctgctggcaaccagggcactgcacggtcctcttgctcatggtgtggtgcccctacgccacctcctggcagctaaggacactgcagggccctcttgctcacagtgtagtcgttgttcgccccctgctggcagctagggacactgccgggccctcttgctgacactgtcgtggctgcacgccacatgcaggcagatggggactaagcagggccctcttgctcccggtgtgacggctggcgtcccctactggccgcctcctgcaccacttaaagtcagagcgccagttattaatccccatcagttctgtaaattaaaactgaaaaggagctattactggggagagctgatgtcccagttattaacttggaagaaagattttcaccaagaggcagtacaaagatggaagataacttcattgaaaagaaatacagtgtaaagagcttattgtaggaaaatagggaggagtgggttcatagtgcatgaaaacagcctaagagtcctgtgcagggaattttattttggacttcttcacattcctgcctctgtctcaagtctatgcttattttccttggttttcctgctactgccttaggtccctgacttgccccacttaggcttgtgggacctcctgttgattgaggtacacgtggggtgatgaatctgaatccactctggcaccaacctccttcccgccatcccaggcaggctgacagcagtcacgtttgtatctactgcacctgcctcttttgaatgtctttctctgccctaatctgtacttatggtgccaggtttctcttaggaatgtcccctttgtccttcttatcagcatgtagctagcaatattctgacatttttattgcagtgaatgatgattggggcatcttaagagaagttctagggtgtttctgtgtaggtacctcttctccctcctaaccacaattgacaagtgcccatccactccagcactggagatgctactaatatgtgcatttttggtggtccctccaggtgagccttcacagactttcccttttccaggagctccccctcctgttcatgtctagctagctatctactctaacagagcccactatcctgtgtctttcccaaaaatagtgagggaatgattaattggaaaccataagaaatcatatgcatgtagatgaaaactttacaacttacacaaataaccactcaaaatcatccttacactaaaaatgcaaaactatacaatttctagaagaaactatagaagaaaagctatgtgcctttgcgtttggtgatgaattttaacaaatgacacagaaggttgatatacacagaagaaatgacaatgtggatttcttaatatttacagtttatactctggaagagaccttgttaagagaaccaaaagacaagccacatattgaagaaaatatttgcaaaatacagatctgagaatttgtattcaaaatacataaaaaattgttaaaactaaacaataagttaaacagcccaattaaaaatgcacacagatctgaacagacgcctcaccaaagaagatctacagatggcaagtacacttacaaaaagatgctcaacatactagagaactgaaaaccacaaaaagatagcacagctggtctatatctcttagaactgctaaactctttaacaaatgacaaattgctggaggaaaaacaagaactcttttcattgccggtggaacacagtgtataagaccaaaatatgccaccccaaaatataatggtaggaaaccagaatatgcaaccccaaaatatgtccctttggcttaagaattattccaagctaattattttgaaaaaaaaaaatgctaacaaaggaagttgtgaaaacagagaagttacacttgtgtaaggaaaatttacatctataaaggaaatcaccatttaaaagctacctctctcgacaccaagaagagaaggataactaaatcactaaagagtcttatcaatggagaatgcatggacttaagtctgtataatgaaccttacccttgtctaatgtgcttttgctggttaactccccaatactgcacctcaaatcttctttctttaagttgaagacagtatttatgcttgaattgaaagccacctgttggagatttactcatttttccctgaatatctcccatgtaaccataaggtatacgtgtttttcaacttttctgtttttctcattttaatctgtcagtttttacagagcatcccatctaagaattccaaaaacagaaaattatttttcctcccctattacaagttgggcatttttttccaaagctaaacaagtctcaccttacaatccaaaaataacattcctaagtattttgacaactactttgatgttacttccaatcaaaagctaccatgcaattatttacataagccctattcataatgaccaaaggaaaaaaacggaatcagaaagtcttacaatagatgactgtatgggaatccactcagacatcaaaagttgttataaagattatttaaatgaaaacatttgagatactgaagataaaagaagaaatcttaccacaacttactttgtccaattaaagcagagctcccagaaaaatacagctgccattaaccccatccaaggagtttcttgcaaattcagctgccatgaagacagcgtactctttcgcattagcattgataaacaaaaattaaattataagctcccaactgactgaacagaaccactcttggctgaggggaccacagagtaactttcaaaactgagttctcagctttgctaggatgggatgatggggttaacatacacatcgttaaacccactcctttgctaaccatgatgaggctttcttccctaaggatttaacagaaaccagccctttcaaagcctccactaccgatatcaacctctcctttcttgcctgataagagaccacccacaacagagaggttctggccagcgtacagaggatgcacagagcgagttttcatgtcctctgcttcaccttttaatgtcagagggctgaaaactgcaccctgggatcatgctaacactgccattttttgtacatgggacccatgaagaagccagaaactcaattgtgcatgcatgcatttctccttccataaatattcatgactcctcctggagcttattaaataaatgtatttggccattccagtcagcataaattgctattttctttacctcctccttgaagagtctgtttctggcttctggctggaggctatgcttcccagcctgtcagaaggacaaccctgcaggctacaaccctttataggaaataaatctctcactggttgggtggctcatgcctgcaatcccagcactttgggaggctaaggcaagtggatcacctgagctcatgagtttcagaccagcctggccaacatgatgaaaccctgtctctactaaaactgcaaaaaattagccaggtgtggtggtgggcatctgtaatcccagctaatcaggaggctgaggcaggagaatcgcttgaacccaggaggtggaggttgcagtgagccaagatcacgccattgcactccagcctgggcaacaagagtgaaactctgtctcaaaaaaaataaaaataaacataaaaatgaagaaatgtctcctttccaaatttatgaacctcatcattcttccgttgacagcattaaaaggttcaaaaagacctttccatactttcccacagaagccctagaaattgtcattttgttcatcattttggatgcctgagaacttgtaatccaatgagtagaaatgttggtaccccatttatggctgtcaacctgccagttctcaggagtttgtataaaagcctaaatccgaaaggatctcatcccattaggacccttgtctccttttctgttgcctttgcccactggctctggcaacaggggtctttctttctccttggctatctttggatatgggggctccgtcttctgtgccaccttagggaatgccttttgcatgcatggctaagtcattaaaaagccttcagtttcagtaacattttgagtgagtactctctgaagctgcgttggaatctcaggcttctttgtctggaagataactcttgggctacaagtttcttatcctagctttggttttgaggcctctctgttctcctcttgggttggaagttattcctggctttttgtttcaaggtgtctctgtgatcttcaacttgctcctttcatgagaacttctcagttgactaaattctcccttctcaaacctctgctatgtgttccaccaatatggaactaattctatttcctttcctgtttacatgattttactaagaattatttagaaatttaatcgctcctttgagaaaatttttatcttccaaattgcctccttttagacttttcctttcccagttgagtctctcaactccctgtaatcactgaaactttaggcatcccactccatgccttggagtgctctccatgctctcaatgtgctcaagaatctgcaaaagcaaacatctggggctgaaaaataaaatagaaaaaattttatttctcagcctccataagattgtatgtccaaacaaaagaaaatcttaaaaatctccaaaaatattggtgagaaaaaagctttggccctcatatgaagaagataaaaacttgttccattttccagatacacagttataatacaaatacaaaatggggcaaagacaaaaaccaagtcttctatataaactagtgaattttgtattattgtaataacattagtcagggttctccagaaaggcagaatcaataggatatatgtagatagatgagagaagactcattaggggaattggttcacataattatggaggctgagaagttacacaatagcctgtctccaagttggagaaccaggaaagctggcagcatgactcactccagatataaaggactcagaatcagggaagccaatggtgtaactctgattctgaggccaaagctctgagacactgattctgatgtcaagggcaggagaagaaggatgtttcaatttcaggagataattcacctttcctcttccttgttattctatctgggctctcaaccaattggatggtgcctgtattcatccatttttatacagctgtgaagaaatacctgagtctgagcaatttataaagaacaaagaggttaaatgggctgacagttccacgtggctgcagaggcctcacaatcatggcagaaggggaaacaaagacgtccttcttcacatggcagcaacaagaagaagtgctgagccaaaggggaacagccccttatgaaaccattggatcatgagaactcactcactgccatgaaaacagaatggcagtaacaaccaccatgattcaatcacctcccactgggtccctcccacgacatgtacggattataggaactacaattcaagatgagatctgggtggggacacaggcaaaccatatcagtgcccatccacactgggtcagggttatctcagtgtcttccagaaacaccttcacagatatgcccagaaattgtgtttcaccagctatgtgtgtctctcaatccagtcaagtagatgtctaaaattaaccatcagaatatttatgcctgtttcatggctgaaattgtttgaccagctatgtatgtttcttaatccaatcaagtagatgtctaaaattaaccatcagaatatttatgcctgattcatggctgaaatttcaggatgaaagctatgaaatctctatttgtgtttgtatatctattactgtatgtaatgtatatgtgatattttcttaactccggatagcactgcaaaattcatttataaaatcctataaaagtgctctattctaacttggcttggaaaaaaataaccatttataaataaatattcaccaaactcctagaaatataggaactgatcaaatgttttttaagttaacatgatttggataaaacttacttaaatgagattaatataaaatttttggtgtaataaaactatgtcttcaaagttatcacttgaatataaaacaaacataaattcctattctgcttgagttctagtcaaataagctaatattatacttacagaaatgtaaaatcttaaagcttatagatttgattctaattaagttgtcactcttatgaaaaacattattcttttatggtgaaaagatacacatgtatttagagtcagccagctggactcagtttagacgatcccaattttgttgcaacatccaaagcttcataatcaggagccagtcgaacatatgccttgttctctttatcaggaaaaatcagggtggtgaccttggccacatcactgtcatagagcttcttcacagcctgtttgatctggtgcttgttggctttaacatccacgaagaacacaagcatgttgttttcttctatcttcttccggcccactcagtggtcagcggaaacttgatagcatagtggccaagcttgtttctcctgggggtgctcttccgaggatatctgggctgcctccggagtcgcagtgtcttgggccgcctgaaggtgagtgacatgcggatcttcttttttgcgtgtggctgcggacacctttcaacactgccttcttggcctttaaagccttcactttggcttcggctttaggaggagcaggagcttccttcgctttcggtgccgtcttgtgaaaagcgaaaaacattatttcaaaaataatttgttcacagtaaatctgcctaatagtagtttccaaagtacttttgctaatttttaaccttaaacttaagctaagtaaaagatttgcattaaatatctagaccatttataaataagatacaatactaaaacattaattactgaacataaataattcaagtttatatacttttggcttcctgtttttacagaaagactaaagatattttggcccgttaataaacatgtttttttctgccacactgagaaattgtattatgaggaaatacatccctctagatgttgggagacagtatattcatactttttctaacctactatagaatgctaatatatgacactttataactgactacttcctagttttctctggaaaataaaagattactaagtattaaaattataatcagtatatgtaaataaaaagattagaaataatggaataactagaaacaaccccatgcaaagcatgcaagaaaagtagggcatgtttcacaagtaaagtaggatgtattttttataaggaaaaccatacataagatacaaataaaaagagatacctaaccttccctgtgttacatttgtatgggtaaaatgttatgttttcagaaatgatataaaattcctgtaaatttgttatgtcctccttatccatgctatgtgccagtatagagtaatgagtcataattccaattattattttaaatattgtgccgggtgcagtggctcatgcctgtaatcccagcactttgggaggctgaggaggatggatcacaaggtcaggagatccagaccatcctagctaatttcttactttgagattgctatccactatttttatatatacgtgtgtgtgtgtgtgtgtgtgtgtgtgtgtgtgtgtgtgtgtgtgtattccaaatcagttgtcctagcttgctccagcatgcctgggcagaactagacaagccccagcccataatacatgccattccttatttggagatgcttccttaactatccctgggcaacttccttttctttctttgttctattccccttacctaattaagaaagtgttaaactaatagtcaatcgggtaaagtgtaaaatgtgaggtcctatttcagccagtggaaactggacacagcactagggtagacacatcaggttataagtaactctgtctcctttgtttggtgtgctcttgtggctggacagctattgagtagcaccctttatgcagaaagtaaagctcgcctcgctaagacatcatttgttcccacgttgttttttttttttttttttttttggaacaccaaaatcttcattcccaacagcactctgagaaaagccagcctgatacctagattacagggttcacagccttcaggttagtaaagaaggtcatttcccggtaggcccaggaatttggggatattttgggggcctcaagaagagaggaattcacacaaagccataaggactgcggctgaaatttgatagtatgtgcttggcttgggttttagcctgaataaggcctttaaaagtcaaatctgagattctgtatgaaaacttccagcaaagaaacttgaaagcacctatgtggtcatctcctgttcttgctgcacttatgtaaataatcaagcaaaatctaacaaaactagacttatttttaaaacaataatagtcttactttgattatgatcaaaaatgatggttactacagagagaaattttatgtttcaatggaaaactataatttagccaggcatggtggcacatgcctataattgcagcactttgggaggccaggagttcaagaccagcctgggcaacatggtgaaaccccatctctaccaaaaatacaaaaattagatgggcatgatggcatgtgcctgtagtcacagctaatcaggaggctgaagagggaggatcgcttgcacccagggggtagaggttgcagtgagctgagactgcacatttgcactccagcctgggcgacagagccggacccagtctcaaaaaaatttttatttctttttgagaaatttgacccccactgtgtcagtgtggggcggtgtggcctagtggaaggtgtttgggtcatggggacggatctctcatgaatacattaatgtcctccatgggggtgagtgagttctgctgtcacaggaatggattaattcctacaggagtagctagttaaaaagagtctgggttccttggcttccctcttgctttcacttttgctatgtgatctctggtgcacaccttgctccccttccactttccatcatgaggtgaaaaagactgaggccccaccagatgcaactgcccaatctcagacattgcagccaccagtattttgagccaaatgaaccttttttacttatacattacccagcctcaggtattctgttacagaagcacaaaatggactaagacacaaatgtaagtaaaaactcactgaaggtgtagggaaaatggtgttgacctaagtcactttgaaaatgaatagaatctgtaagctgaaggcaaatcaactatacttcatccttggattccattttacaaagttctttccaacagaagcaactgcgaacaactgtaaaaccacagtgtctgtatctggaataaaacaatgacttacattaagtcgcagatggtgggaaccaggtttctcactgttgaagtgggaggttacaaattagcaaggcgacaaggctagaataattcatgtgatagtagatcagaggtggagacataaacgtaaacttatgtttagtttaatatagatacacacagttctacatagaaaactttataattaggtgtgtataggtaggttagacacacacatatacttcctagcattactaatgagggacaagatacaatgtgctctttcagcagccagacgtaagttttcctaccattctgaaaggaatcaggctccttgaagaaatgtctgatactagaactgggagagtaaatataggagccaggataatctggaagtatcagaaagtaagtaagtactaaaaaaattaaaatatatcaaagaaaaataagagccaataaaaaaaagctaccgattgccaacacaggaatgaattgtgcaacataatgctgcagggttgaataatagctaaagcttaaagtaattatctaggtgtctgtatttgtatgcataggtgaataagcaaatggagttgcatagaaatctcctttgcaaaagaattccaaccctaacctgacaaacagtagctctgcaaaatgatccaagtgaatatcaaaggtaacagttcaccttgagaacatgaagtgacaatgagggacattctacaaaatgcctgaccaatcctcctcagtactatcaaggtcacctgagatggaaagcctgacacactgtcacagccaggaagagcccacatgatgactacatgtcatgcgggatcctggatgggatcctggatcagagtaagacacatctaagggaatccaaatgaaatatgaactttagtctatcagtattggttcattaactgtgacaaattgtgtaagatattaataagccatgtgagacacactaatagaagatgttaataagagaggaaactaggttgcggctacatgggaaatctttttttttttttttttgacaatttctgtgtaagtaaaaagatgtaaaataaaactttatttaaaacactgttttttgaacacttccttgtttaattatttataccatgaattactagtaattgacactgttaactagtcctatttttttaaataagagcatttatgacacaaaaaattaaacagtgcagactgacatataaatcaaaacaaatgttctttacatgttttctgttactgtagtaacacacatgtgtaaacttaattctcatatttttttcttgtgctgtggttgtgtcctgggttcattctctaaaatgctgttcaccttagaccaggaaaaatattaaccttacagactctgtttcaattcatagccaaatattttcacaagagtgactttgtaaaaatatgttccaatggcaaattgattcattgtgatgggatcacttattccgaagacttcctgtctttattttgttgccatgcctaccttttagccataatacagcagaatcaaatattgctcactgggaaaaaatattcaaagaaagaaagaatgtggacagaacttatgaccatgatgattcaatgttttaccacaatgctatctaaaacagaagagtgtaaaaggatattcaaagtcaatctcctcagtgaggctttgcagaaaatgaggaaactagaaaaacaaaaatggcgggacattctacgggtgattttacatgttgctatgttttatgggaaaaaaatactttaccttttaaagaatcactaagaattattggaaacccaaattctgggatgtttgcaaatttagttgaacttctatgcaattatgtctatataggtagccacgaagttgatgattttttaaaaatctgtgccttatttgtgtaataaaatacacaatgaataattaatactcataggaaaaccttatgaagggaaaataaatcttggggacccaaaatcactaagctaaagggaaaagtcaatctgggaactgcttagggcaaatctgcctcccattctatccaaagacacccacctgctcaccgagataaatgcatacctgattgcctcacgtggagagggtaatcagcaatgcaaaagaatgaaatcgtttgtctcttacctacctatgacctggaagccccctgtctggccttctcacctttctggactgaaccaatgtacatcttacacatactgattgatgtctcatgtctccctaaagtgtgtaagaccaagctgtgccccgaccaccttgggcccatgttgtcaggacctcctaaggatgcatcatgggcgcacatcctcaagcttggcaaaataaactttctaaaaaatctgagagccgtctcagattttcagggttgacacatgtaatgtaggatgtcaatgtttataaaacagacattattctatctactattagaaatatgctgccaattaaccttaaactttctcaacaaaataaaaaatgttgaggtacaaataatacatctaagcttaagtggtgttgcaagttttaatacgcctacttttcaatttttcaatactatttttactaatttaacactgtaagaaaaatgagtaattaaaacaagaataaaagtgtttacagggggtgcacatgtttcctccagcctctgcccaaccccagctttcatcccaactgtcctgatggtggctctaagcatttctcctttctctataccaagatctctccccagaaacaaacccaaatcttactgtatgttatggcacgttatgatgatgagcagtgatgagcagccgaagcctcaaggaagggatgcttttgtaaaacaagacttgtggaatgtaacatgtgaaagtaaagcccatggcagagctccctcctcagcacacggggagcagacaggaagtttttcctcaccttcctcaatggcctgcagccacgtctccccaggtcagtcttaaggacaacgaaactctggtcttcactgtggacatgccacactaccaggtgctccaaagccatggtgacccgtcctcgggtgggtcctgaggagaaaaaagctctggttctaatcctaaccctaaccctgtcccaagactttgaccctgaatctaaatcctgatccctaccctggtccctaattctgaccctaactttgaccctgactttgatcttgaccctgaccatgaccccacctctaagcatacttctggccctgactctgacccagatcctaatcctatccctaaccctattattatctttacaatctatgtctaatcttactgtctagtgctaaatagctgtacccgaaagcacttttaaattatttaacttcttttccttgaattctctaaggacatcctaaaggagatgtcattatgtattttgcattccctctgagtggtatggcttcacatatgaagttctaatactttgcaagacataaaatgtttggagggtaacagcactgggttgttagggatgtatgttggcattcatgatagattttccttaaaataagaacaaatggcttgagtaggcttttggaatgtaggatgtttccgttggttcatttctgtgttcagtattcccacatgaatctaaacatgactctgctcttagtagctgtgcgaccctgggaaagtcactcaatctccctcagctaaattttgttgtgtgtgtaatgagaagagagttgtgatttgtatttagtgaataataacaaacaaaaggcatttagctttctggaacctggtatgtagtagaacctcatggaaatactagctctgttaataaaactagcccaaaacaaggtttcaaggtcaacaacagtatcaggcagtgaaggacatagacgagaagctgcttctgcagcctgtagctcctggaggcccattttgtccatgatttagcaggaacgcactacctttccatgaggagaaactgcccacagaaaccaacgccattctttgaagacaaacatgtcttaatagcctttacattaagtaatagtgtaatataagtaataatttgttattagtaataatgtgaaattatttacactaccctaacccctaaccctacccctacccctacccctaacccctaacccttaaccctaacccctaaccctaacccctaaccctaacccctaacccctaacccctaacccctaaccctaaccctaaaccctaaaccctaaactgtaaaccctaaaccctgcgcactgtggttcacgccagcaatcccagccctttgggaggctaaggcaggtggatcacctgagtccaggagttcaagaccagccaggatgacatagcaaaacaccatctctactaataatacaaaaaccagctgtgaatggtgacacacagctgaagtagcagctactagggagactgaagcaggaggactgcttgagcccagaacgtgcaggttacattaagctgagatcgtgccactacactccaacctgggcaacagtgcaagaccctgtctcaaaaaaaaaaaaaaaaaaagacatggtatgatggctcatgcctatcatcccagcaatttcgaaggctgaggcagatggatcacttgaggtcaggagttggagaccagcctggccaacatggctaaaccttgtctctactaaaaatacaaacattagggccaggcacggtggctcatgcctgaaatcccagctcttctggaggccgaggcaggaggatcaactgaggacgggagttcaagaccatcctgaccaagataaacaaaccccatctcaaacaaaaatacaaaattagcctgctgtaatggtgcacgtctgtaatcccagctactcaggaggctgaggcaggagagtcgcttgaacccaggaagcggaggtgacaatgagctgagatcctgccactgcactcccgcttgggcaacacagcaagactctgtctcaaaaaaaaagaaagcaaaaagacaacccacagaaaggaagaaaatatttgctagcacattatatatctaacaactgtccattaactacaatacatacagaatatgtataactcaacaacaaaagcaaccaaattacaaatggcggaagagttgaactcacaccttgccaaaaagacatgcaaatagaaaacgaggaaatgaaaagacgatcaatatcattatcattatggccatcaaaactgaaaccacaaccacatactccttcacacacactagaaaggctataatccacaaatattaagtaacaagtgttgtcaaggtcagagagaaatcacaaccattaaatactgtatgtggaatataaaatggtacagcctatttgtaacatagtttggtatttccacaaaaagttaaaaacacgacaggcaaggtgactcatgcctataatcccagcactttggaaggctgaagcaggcagatcacttgagtgcaggagttcaagaccatccagagagacatagcaaaaccccgtctctactaaaaatacaaaaatcagccaggcatgctgccacacacctctagtcccagctactagtgaggctgaggtgggaggaccgcttgagccccgaatatcgaggttgcagtaagccaagatggcaccactgcactccagcctgaggaacagcacaagaccatgtctttaaaaaaaaaaaaaaaaagagtaggcatggtggctcacgtctgtaatcccagcactttgggaggccaaggcacgtggatcaattgagtccaggagttcaacaccagccagaaggacatagcaaaaccccgtctctactaaacatacaaaaattagtcgtgcatggtgacacacacctgtagtcacagctactagggagaatgaggaaggaggactgcttcagcacagaatgtgaagggtgcagtaagcagagatggcaccactgcactccagcctcggcaacagtgcaagaccctgcctcaaaaaaaaaacaaaaaaaaaactggccagtcgtggtggctccccctgtaatccaagcattttgggaggcacaggcgggcatatcacctgtgaatagcagtccaagacagtctgatcaacatggagacatccagtctctaataaaaatacaaaaaagttgctgggtgtggtgacccatgcctgtaatcccagctactcgggaggctaggaggagaatcacttgaacccaggaggcagacattgcggtaagccgatgtcacaccactgaaatccagcctgggcaacagagcaagactcagtctaaaaaaaaaaaatcaaaaggcaacccacagaaaggaagaaaatatttacacgttatatatctaacaacagtctgttaaccacaatatataaggaacttgtataactcaacaaagacaaccaaattacaaatggagaaagagttgaacgctcgctttgccaaaaagacatgtaaatggaaaacaagcacatgaaaagatgatcaatatcattatcactatggccatcgaaactgcaaccacaaccacatactccttcactcacactagaaaagctataatccaaaaaatacaaaacagcaagtgttggcaaggtcagagagaaatcacaaccattaaatactgtatgtggaatataaacggtgcagcctatttgtaacagtttggtatttcgtcaaaaagttaaaaataggccaggcacggtgtctcatgcctttaatcccagcactttgggaggctgaggcaggtggatcacttgaggtcaggagttcaagagcagccagaaggacatagcaaaaccacgtctccactaaaaaatacaaaaattagccaggcatggtgccacacacctgtactcccagctactagggaggctaagggaggacaactgttttagcctagaacgtggaggctgcagtaagctgagatcgcaccactgcactccaacctggtagacagcgcaagaccctgtctcaaaaaataaaaatcaagaaaggtgggcatgctgcctcacatctgtaatcccaccactttgggaggctgaggcaggaggatcacttgagtccaggagttcaagaccagccaggatgacatagaaaaaccccatctctcctaataatataaaaattagccaggcatggtggcacacagcttcagtcccagctactagggaggctgaggtgggaggactacttgagcccagattatggaggttgcagtaagctaagatcgaaccactgcactccagcctgggtaacagtgcaagactctacctcaaaaaaaataaaaaaataaaaaaaggccggtatggtggctcatgcctctaaccccagcactttgggaggctgaggcaggcagatcacatgaggtcgggaattcaataccaacatgaccaacgtaaacaaaccccatttcaactaaaaatacaaaagtagctgggcatagtggcacatacctgtaatcccagctactcgggaggctgagggaggagaattgcttgaacccaggaggcagaggttgtggtgagccaagagcacagcgctacactccagcctgcgcaacagggcaagactccgtctcaaaaaaaaaaaaagtaagtgaaaagacaacccacagaaaggaagaaaatatttgcttgcacgttatatatctagcagtctgttaaccacaatatacaaagaatttgtataactcaacaacaaaaaccaaattaaaaaaggagaaagagttgaacaacacacactttgccaaaaaacatgcaaatggaaaacaagcacatgagaaggtgatcagtatcattatcattatggccatcaaaactgaaaccacatccacatactccttcatacacactagaaaggctataatccaacaaatgtaaaataacaagtgatggcaaggtcagagggaaatcacaacccttaaatactgtatatggaatataaacagtacagactatttgtaacatagtttggtatttcctcaaaaagttaaaaataagccgggcatggtggctcatgcctgtaatcctagcactttgggaggcagaggcaggtggatcccttgaattcgggagctcaagaccaccaagaacaacatagaaaaaccccatctctactaaaaatacaaaaagtagccaagcatggtgtcacacacctgtagtcccagctactagggaagctgaggcaggaggactgcttgagcccagaatgtggaggctgcagtaagctgaggtcgcaccactgcactccagcctgggcaacagcgcaagaccctgtctcaaagcaaacaaacaaaaaagacctgccatggtggctcacgcctgtaatcccagcactttcggaggccgaggcaggtggatcactagagtccaggagttcaagaccagccaagacgacatagcaaaaccacgtatctactaaaaatacaaaaattagccgggtatggtgccacacacctgtagtcccagctactaggaaggctgagacgcgaggactgcttgagcccagaatgaggaggttgcagtaagccaagatggcaccactgcactccagcctgggcagcagaacaagaccctgtctcaaaaagaaaaaaataaaataaataatggccaggcgtggtggctcaatcctgtaatcacgacactttgggaggcagaggcgggtggatcatccgagatcgggagtttgagaccagtgtgaccaacatggagaaaccccgtctccactaaaaatacaaaaaattagccaggcatggtggcccatgcctgtaatcgctgctactcaggaggctgaggcaggaaaatcacatgaacccggcaggcggaggttgcagtgagccaagaccgcaccactgcactccagcctggggaaaagagcaagactcggtctccaaagaaaaaaagagagactgaaaagacaacctacagaaaagaagaaaatatttgtgcattatatatccaacaacagtctgttaactacaatatataaaaaatttgtataactcaacaacaacaaccaaattacaaatggagaaagagctgaacacacacttcgccaaaaagacatgcaaatggaaaacaagcacatgaaaagatgatcaacatcgttatcattacggccatcaaaactgaaaccacaaccagatactccttcacacacactagaaaggctataatccaacaaatgtaaaataacaagtgttggcaagctcagagagaaatcacaacccttaaatactgtatgtggaagataaaatggtgcagcttatttgtaacatagtttggtatttccttaaaaagttaaaaataggctgggcaaggtggctcacgcctgtaatcccagcactttaggaggctgaagcaggcagatcacttgagcccaggagttcaagaccagccagtacgacacagccaaaccccatgtctactaatacaaaaatgagccagacatggtggcacatggtggcagacatggtggcacacagctgcagtcccagctacttgggaggctgaggaagaaggactgcttgaccccatattgtggaggttgcagtaagctgagatcgcactattacactccagcctgggcaacagtgcaacaccctgtctcaaaaataaaaataaaaataaaaagggccaggtaagatggctcacacctgtaatcccagcactgtgggtggctgaggcaggcggatcacctgaggttgggagttcgagactagcctgaccaacatggacaaaccccatctctactaaaaatacaaaattggctgggcgtggtggtgcatgtctgtaatctcagctactcaggaggcctaggcaggagaatcgcttgaacctgggaagcagaggttgcggtcagccgagatcgcaccataatactctagccttaacaacaaaagcgaaactccgcctaaaaggaaaaaaaaaaattagccagtgtggtggtacagacctgtaatcccagctactcaggaggctgaggaaggaagattgcctgaacctgggcgatggaggttgcagtgagccgatatcaggccacttcactccagcctgggcaaaagagcaagacttgtctccaaaaaacagaacaagaaaaaggaaatgcatgggacgaagtggcatatcctgaaatgaggactttccttctggactggggtttccgatgaaggtgacagtttatccttcagtctccacaggtcacgaatttgccgtccaccaagaggcaacagagggagccccgccaagtcccatgccagaactatgacataatcacattccctcactcatttcagtacctaaatattaataattcatcagcttaaacatctacacttactttaccaattttccattgtatagatgaagaggtttccaaattttatataggttgtcatgatgtggacaggactttttgatagttaactatagcgaatgactaaaatataagtgtttaaacctaaaataccttgtaactgttaacacagggctacagaacacagcaacgtaacagtctgtccagtaaattcttctgaaattcctttttttttttttatagacggagtctcactgtcacacaggctggagtgcagtagcacaatctcggctcattgcagccttcacctcctgggttcaagcgattctcctgcctcagcctcctgagcagctgggactacaggtgcatgccaccacaccaggctaatttttgtattttcagtagagatgggatttcaccatcttatccaggctggtctcgaactcctgacatcaggtgatctgcctgcctcagcctcccgaagtgctgggattacaggagtgagccactgcacccagccctcttctgcaatttcaataatcaattgtgctatttgtctttctttcagcaatgagattttatttttctttcctaattatttcaaacatgaactttggttccagagaactagtatttccttgatttataaattgagggcagctgggcacggtggctcaggcctgtaatcccagcactttgggaggccaaggcaggcagatcactggaggtcaggagatcaagaccagcctggcaaacatggtgaaacctgatctccactaaaattgcaaaaaatagccagccatggtggcaggtgcctgtagtcccagctactcaggagactgagacaggagaatcgctggaacccgagaggtggagactctggtgagccaagatcatgccactgcactccagcctgggtaacatagggagattctatcctcaaaaaaaaaaaaaaaaaaaaattgacggtcgtctcacagacaatctaataatgaattatttttttgtctttagaaaatcaacattaacttttctacttttagatatcgtaattgctgtgacttgaaggacttatctagaaaaagccttaaaaaactacggtcagcactgggtgaatgggttgagggaacccacataaaatccccaagacacctgggagtccatgtccccatgagtgggactgcaggcagctgtagcagactggatgggagaggacagcaggcaggagaactcggtgtctggagtccacggttctaaggccagtgaaaaccactggcaaagtgaaatccgaagcttgacaggatgaaatttgtgattgtaaatgaatatttgccatttccaagtgagatcgccagtggtggtgggatggacgggtgctcctccaagtgggctgcagtgaggagagcgcggcaccacgccaggatgctcctgccaggaacacaggatctgcacacgtttaggaggaaacgctgggcagacccagcttggagtcatctctgctctttacatctgttaaggctgtgaaaactgagagtcggccggatgcagtggttcacgcctgtaatcccagcacactgggatgctgaggcgaatggatcacctgaggtcaggagttcaagactagcctggccaacatggtgaaaccccatctctactaaaaatacagaaaattagccgggtgtggtggtaggtgcctgtaattacagcttatcgggaagctgacgcaaaagaatatcttgaacatgggaggcagacgttgcaatgagcagagatggcgccattgcactccagcctgggtgacagagggagactccctcaaaaaaaacaaaaaacagaacactgagtctcaggaacagttcccgagaaggaaaattgggcccgcatggaaatagacatttttctcccacctagggcagggagtgaagtgaaataggtctgtggagtggactttcacatagaaaccatgtatttcctaaattgggggttacttggggatcacctggaggagtattcctggttttggtgaaacacacgggggtattttttgtgaagctgcaaatctggcacagcaataacggctggggaactggagatcaaggagaaggcatactaagtgctgttgcaagtttcccagaagtatgacattattgggaagtaaactactttttaaaacaaccgtggcaataccacgtcagtaagccagagacaacaccatgaagtttcatgacagaggccaaatgcagcccaaacccagcccagcagaggctgtcaactcagcgccccagcgagagccggaaggttccatcctcagagctgcagaccctctcgtgtgggctgcaaaggccatgtctgcatcccgggcggtatgtacgctctgagagatacatgcgtgttccgggggttatatgagtgtgacgggtgtggcgtgagtctgactgtgtcacgggcgttccaggggttacgtgtgtgctctgagggacacatgcgtgttccgggggttatatgagtgtgacggctgtagcgttaggtgacgatgtcatctccgcgttccaagcgttatgtgcgcactgagggacacatccacgttcccggggttggatgtggaaggcagctaccccgacgggtgtgctctctgcatacgacgggtgctaacactagcatcacagatgcagtgttattagcactacagaggttattgtcagtgtggcgggtgttctagttgctttcctgacactacatttctgttccaagaccgcagcttggccctgtggccgcctcgccttgggtgtggagaatgaacctcgagtgcgctggattcacaggggattttggtttctaattttccacatgaagggtctctacccctcagcagtcagggctgaaaacaggaaggattttactcaaccatggacgccgccggctcaaggtgtcccaaagcgaggggcgtttcctggtatgtgctgaggagaacgcggctcccgcccttgcagggtgcaggcgcggaggaagcgtgcgggatgcggccgcctcaaggctcagaaaagccgggctcgcgcgtgctctgctggcggccgggggcactgcagcgccctagagctcaaggcactgtcggaagctgagcgccctctgctacccctcctgctgcaccaactaaaagacagcatggagtgttcggcgccatcattctagaaatgcaaactgacacagagcccattagcccgtgagtttctaaaaatgcagaagggacaattaattggaaaccataggaaatgaaatcaacatgaatgcacattttacaacttatgcaaaaagtcactcaacatagtcctcagacttaaaatgcaaaaccgtcagaggcctcttaaccacagtgactttatttcaaataaaggcttttaaaaagttaaatctgggcagggtgcagtggtcacatctgtaatcccagcactttggaaggccaaggcgggtggatcacttgagatcaggagttgaagaccagcttgggcaaatagcaagacccttatgtctacaaaaaatatatatatatattagatggcatgcttgcacatacctgtagtcccagctacccaggaggctgaagcgggaggattgcttgagcccaggagttcgaggctgcaatgagccagccataatcgcaccactgcactccagcctgggcgacagagtgagaccctgtctctctctctctgtcacacacacacacacgttaaatttgttggattatatatttcgggggttgagcacttttcgttataaaatatttatgattgtgggaacaagttaataaagacatgaaagttatttaaatgtcccagaactttaagaacaaaaagcattcttagtttaaaaataagttttactttaaaggtaacagtacacacataaattgttgttaaaatcgacagtaacaaagagaagtaacaatactaatagcctgtcacaaactgattcttaataacctatataaacaaacattaagcccgggcgccgggtggctcatgcctgttatcccagcactttgggaagccgaggcaggcagatcacttgaggccaggagttccagaccagcctgaccaacatggtgaagcccagtctctaccaaaaacacaaaaaattagccgggtatattggcacgcacctgtaatcccagctacttgggagactgaggcaggagaatccttgaacccaggaagcagaggtcgcagtgaggcgagaccatgccattgtgacaggagagaaactctgtctcaaaaaaaaattatatgtttacaacaggtgcatttctcctcttgctttctgaggacgccctgctatgtagctgagtagtcactaataaactatcttaacttcactatactctgtgacttgccaaaaggtctttcccatgtgaaatccaaaaacctgttcttggggtctaggacaagacccattttataatgacaaaactatacaaattctagagggaaacatagaaagaaagctatgtgaccttgcgtttggccatgagttttaacacgacactatcagaggcatttgaacccctcctctatatgaactccagggtggtttatgttccattggctaagagaaagttttcttcaaaaatgtgacatgatttgaggtcaaacattaatatcaagtaaactcaaaagattgagaagctagcattagttctgggaaaaccagaagtgtgccttttttggaaataatcattggtagcacaaacttaagaatctccaaaggaaataaaaatgagttattaacttacagttttcaccaattaagatataaatgaagctaacgaaatccggaaatacaatttcactgtttttaatgttcattaaaaaaaaatccttatcaaatagccccagtaagtcaccaattaagtctttactacttaaaagcaaaatccacctatgtcctgaacagtatccactttacgagcctcattatatgtacgagataaaattcagaaataaataaatatacatgtatacgtatacaaatatatttcaaattaaaaaatacttttagatagtggtatgtattacatttagaaattaataacgaagtaaattatgggatgtcatccacgcctgtcccaaaggtaccgaatttataaatcatctcaggtgcggagcaggacaggttgaaaataggaatgacatgaacccgcgcggaacagctgccggcgcggtgtccagggcggcaccccgcccggtcccggcccctccagccctgggcccgacccctactacgcctctgcctcgacgcgaacgcggagcccgagcgcgcgtcacgccgtgtggggccgaagaggctgctacccagaggcggagtgcgggctcgcgagggtccccacccgactctcgctcccgccagcacctacggactcgcgtccccgccgcgcgccgactcgggagcagcaccgcccccggcacaggagcctcacgcgcctcttacctaacaggaagttgggtggaagcagcgcggacccacggcacaccgaacgcactccaacagaacccgacgcagacacgcgctttcaaccggcggagacactggcagggccagaaacgcgcgcagcgggggcgggaggtcggtaagctccccgcccctgcccgagaccccgccccggcccggccccgcctttttctctgcctcccctccctgcacgtacgggccccgcccctcgcgcgacgttttttgttgacccggaaacggattctccggagccgaggtccgctcgggtgagtgccctccgctttttgtggccaaacccagccacgcagttcccttcctgcggcgtcctccacacccggggtctgctggtctccgcggatgtcacaggctcggcaaccgccctcctgtcggcggggagtcccgcgacgcccggaaatgctccgaagcctgtcgcccagctgccagatctgcgtctgtgtccggttccgtcactgaggtcgcccctgtccggcccttccaccctagttctcttcaccgtccgcccatcctatcgcgcgcggcctcaggtcccgattcggcatgtggcttgtcttccatcgtccccaccctcgcccctcttggcccctcagggcagccctgggattcggcagacgccagtcctccctgagatgcttccccatccttccctccgccaggccctacgtctccgcaaaccccacgcttcggggtggccgcctcagacaggaccctgagtccgagactggggtaggggacctgcccgatcctgtaacaaccctcgtgcttctgcacaatcgcctcccactagcggtgactgttgggtgtttaccttcccggtgtcccactgagaagcgggctcttccttggcaggggcttcttcattgcctcgctgtggatgtcgaggtggggcaggagagtgaggagaaaacagaggagggaggtagagccaacgagcgagaaaaggggagggaagtttagatgggaagtggatgggtctgaggaatttgaacaaacaccgacaatgaaggagagtgacctgagcaagtagtagtggggtaaatggaaatagacaaaatgggaatcagcagagatatggaggacagaatacaatgaggaggccttgaccgtcagtagcagagagggcagcagaagcctaattcccaaattctttagatggttttctgatttccaaattagtttcccttttaaatttattgtgtcaggttcagcttatgaggcctcaatacttttcagtcttaattgtatattgaaaatactttttgtttactaaatgctttttacattaattcagtgtgcacttcgtaaggataatgatgatttgagttagtttagtattcaacagcttcctctattcctttatatgatctctgtatttaatggctgtggcataaagtttccaactaagtttaagtatcaagttttctttgtgctgttttctgcaaatattgaaggatgacctggattgtcctagaactttgttccaacagattacatgtgttcataatgaatagactgctcaaagatatttccaaagctcaccttttatgtttttcagttccaataattacatctttttaaggtttatattttttgatgacttaatgtgatgttctggagaagacaaatgcttttaatcaatatgattaaaaccgtgaaagacaaatcgctgttacttaagagtgtgacatatgatctgaaatctttagggggcagggatgttaagggaaaactgccactatcgtattaaggtcatgccattcctgtgaagctggtgcttgttactctctactggcttctgttcacctttccaccggccccaagacacacacatagtgacacaaggcagtggacagggaaagagcaagactttataaagtaagcacacaacaaaggtatctttctaatgaggaggaggtgttggttctgggaaggaagcttgggatttgggtattcaggatccagaagtgagagagcctgggaagttcaggaaccagagaaagaaaaagccttgcccattctcacccatgacactgtgctcagcaggtactagcagacttcaggctctgtgactaaaaggggtcagaccagttgatatacccacagctgccatgtaaggatgtgtgtggacttcactagggaagaacggtgttatgaaagaaggggcagaaaaactcacctgttggtctgcatgtagaggtttattgtcctgaattcctggaggttcagtgaaaagcagaagattgtcttttacacatgttgagttatgcccccatatatgtggttgtggtaaagaaagagggtgtgttgatgagaggtcctgaaatgcattttcctaatactcagcaggggcttctcaagaaggatcttccctaagaaagaagctcagagaacaaaaatggaaaaggattagatatggcactttcactggaaaaagtcatgttattcattgattgttttgtcatctcccgccttaagtgttgtttttaggatgtggtaatctctgaccctgcctaacacatttcccaactcacccatagccttcccttaacgtcctcccatcttcacgctatcacactgtgacccagtgaattcgaacttgtgaagttccattcgggggatcatatgggaagggcttcacacccagacatagattatagatgggaagtgggccacatggtgtcagtgaggcaagtatgggtcgtttagggacaatgcactgtcagatctttgttgaccatgattagagaaactgtgcatattagtagtgaattaatgtcaggaatatctgacaaatcctggaaaagaagattgatgagaggaaatgtgttctgcccaactgtataatgcatttgaagcttaaaacaatgaatcagtattgatctggccacaaaatattaatgatttgaattaaaaagaaaagtttagaaaatgatagctttgacaaattaaggtagcatttcatccacacgatggagtgtgttttattcagtaattgatttaaaaatggaatcaacctaagtgtctaacaggagggagttttataaattgttcacagaacatctgttccaaggagaccttgatgttcatagatttgtaaagaatgctgcttactagcacactgactgctctgcaaatgtctgagggttcctccacttggggcaagttgggggtttgatcgcagagtaaataaatggtgcattttataatgtaatatattctagcaagatgcagcccacaaactgtatagatactcttatgtaccacataaagttcatctactactttaaccagaacttgatactgtatgtatgttttttttttttagatttggataaaatgacaactcattgttatttccagttcacaaagtaattgtgaggctgaataaattttattattttatagacatatgtgtaaaatgaatttttctatgaaactcatttttgatgtatattagatgctattttatattctgtagtttaattatatgtacgcacacacaaacacacacttcggtgtcttattatgtttctgcagtgaaaccaaaatccttccttcacgccctttgattttatgttttcctcaggaaggcaggagctattgtatatgataaaatattatgttttattcagtccacttatgaaattgtttaatattgttataaatatttatatgacttattttaaatttccaaataacataggttacatgaaatttgacaactttatttttttcttttcacaactattttgactgtatactcaccaaaaatcaaaatttagacaaaattgacttttagactaattctcattttttacatgtaaaagaccacatgggacttttaagtctaggttgccctgagtctacagtcactgaggttttatgtcactatgtcctccattctaataataggattttcaggctttattcatgtcatttttatatcctcattaagttttaaaatttatttacatgggtctacaaatttatttcaaatcgtagtcataatatttgcctgttgtaaatagacactgattttgtgtgtttgctttttttaaggactaatgttgctaaacaggaaatattgatttcagaatattcataatagttttgcccactttttaaatattcttattagtattgataattagaattgattccactttttcaagtttacagtcacgtcatctgagaataactacagttgcagctctttgactccatttttgtagtccctctccttttccctcttgttttggtcccacctcaggcatcatgtgcagtggtgaatggcatcagcctcacccagcctcctttttccagccttacctttagtggaaatggttcttttgttaactgctgaatatattgttgagattttattgattaagaagaattagtccccacaatttggtatgatttttaaagattttatattatttttaaagatttaaattatatgaaaatgttttttcaaaggtctattaatgtgatttttttaatctttaaaattactttgtgaaaatgataggttttctagtatggaattatccttttattattgcaataaactccactttaccatgctctgtcattatttaaccataccagtgatggccaggtggccaaaataaatagccaaatggctaaaattgtattgatgatttttgcaaatgtaagtaaggaaaattgttggttaaatttgtagttattgttacattcatgttcattttgattagcataataaactaatgaggacaggcttatttttctccttcaaaataacttaggttacaaaggaactagaagtgatttcacatgtaagaactctcacaaatcacttttacagttaaactctgatatataacttaaacattaaaattggctaatcagatttttgtgctgattaatgagggaaagtttttactctttttgtggaaagtaatatacatattcatgttggaatataattattcccatttcttagattttaaattactacttttaaataaatacagtctcttttattaacctgtgttttttctttccaccgtgggtcttttcagtttcatgattttgctctcaaaactttttaattattgatttctgtcaaatctgttcattcattacattattttattatttattaaattgttttatctttttaagtcttattaatatgtactgaatttgtaacaatttggaaagtcaagtaactcctgttttatctttttcttggtttatgagtgtttttaaagttttacgtttcttgaagatcacagctgtagccccaattccatggttctggctacttacatttatcatacttattaatatcatgaatgtaattggaatacccctttgattttactggtgacgtatacccactagtgtactgagacggaaaaaaaagtctttagaactcagataaatatacagttcatatttactatttatgtatgtgtgatctcattattaaattactctatcatgtttgtggaattagcagtttctctttgaatttggatgtttctagttatgtgtatttccaacgtatgtttttagccacatacactttattgaatatcatatttggtgtttaatttttgctaggattataggctggactccagatccaaacttgacatgtagcagacccattaaaaacatacattaagcccctagcactgttttaatctccatggcctggctgagcttctgccatctgtcttcctaggcaccatgaggtctggacatctcatttggcataactcagctgtggccattggtggatctcatccttagtactagtccctgctggcaggggtgacccaggcccacataagccattgctggcctccttggaggacttagagaatcctgagattgcccatgaggatggacatgcctttcagtctagcacccacctttagtgatgcctgtggagattgagaagctcacaggggccttggatgtctttcttatacctccattgtctgcagcgtgactcccatactcttgagccaaggtagagaatttttaggaggcttgtgtggaggtttatggtggcccccatggttctgtgagactggtagaaagcacagaccccttagacttctccccaaggagaatacgtgagactagtggaggaaaggagagtaatgaaatatgcatttcgtgtcccaggctatcagagcacagctctaaggaaaaatacagggcatcgtatagcaactggcacagctctgtgagactgggagatattgcacaaccttgaaaaatcaagatgtgaccctactgaatgaacaaaataaatctccaataattgaccataaagaaatacaggtttctggctgggtgcggtggctcacacttgtaatcacagcactttgagaggccgaggtaggcagatcatttgaggccaggagttcaaaatcagctttgccaacatggtgaaatacaaaaaaaaaaaaaaaaaaaaaaaaaaaaattagctggtcgtggtgacgggcacctataatcccagctactcaggaggctgaggcaggagaatcacttgaatccaggaggtggaggttgcagtgagctggtatcgtgccgttgcactacagcctgggcaacgcgagtgaaactccgctttaaaaaaaagaaaaagaaatggaggtttctgattttcctgataagaattacaggtaattgccttaaaggaggtcaatgagctatgagacaacactgataacaagtaaaatctggaaaaggatacatgaacaacatgagaatatcaacaaagaaaaaccataataaaagaatcaaatatagattctggggctgaagaatacagtaactgaactggatcaatacaaggcttcaagagctgacttgatcaagcagaagaaagaaccagtgaactcaaagacaggttatttgaaattattcaatcagaagagcaagtagaaaaagaattttttaaaagtgaagaaactgtctgtctttgctaaaaattggagggtcctaagaactcctccccgcccccactgccaatgcagagtcttactctgtcacccaggctggagtgcagtggttcgatctccgctcactgcaacctccacctcccaggttcaagcgattctcatacctcagcctcccgaatagctgagattacaggtgcctgccaccatgcccagctaatttttgtatttttagtagaaacggggttttggggtttcaccaagttggccaggctggttttgaacttctgacctcaggtgatcctcctgccttggcctcccaaagtgctgggattacaggcgtgagccaccatgcccggcaagaactcctttttatgttagattcactagggtttagcagctcacagaacccaggaaaacagtttacttagctgatttattacaaaggacattttaaatattacatatgaacagccagctaaagagttacatacagcaagttttggaagcatcttaggtttaggaggtctgtctccaagcagttggggggtaccattgtttcagcatatggatgtgttcttcacccacccagaagctctaggaatcccatcattcagggatttttatgtggtgttcatcaagtaggcataattgttattaactcgatctccagcctctgtccctttcccaaaggatagggggtgggactgtacgttccaagcttctgatcaagtcatggtctttcaggtgatcaccccccatcctagagcctagtaataattgtctcattagaacagaagacactcttatcacctatgaagttccaaggcattacgagctctgtactgggaaccagggtcaaagaccaaaaagaacaaaagcttctcctagcaactctgttgcttaggaaattacaagggttttgggtggctctgtgccaggaactggggatgaaaaccaaactatctatttcttacaactaacaatgtcacatacatgttcaagttttcatgttcttagtgtcctttcatttcaacttgaggaactccctttagcatttcttgtaaggtatgtcacttgtaaagtgtgtcttttaaggaatccaccatgataaaatgaaatttgaagctgcttggtagataaattcatgctacatttatctacaggtcagacttgagggactggtatttctagaagcctcacatggaagagacagaatcattcagtacaagtgtatccagaggaccagcagaagggagaaggaatggagggaggctcctgagggctgagatgcatgtggagaaagcctgcaagcacacaaaccgagaataattaaatctgagaaattccaggatttatctgtaggtggagccacatctccatgattcagggattcttaggatttggaatcatagaaggaattaaacatttcagaattccatgcgctaggtggcatatgaaactccatgattttcacatttctaggtctaaaataaaaatatttatatctttattagcagcaatagtcatttcttctgaccctgggagaggagagccaccaacccaacccaccccctacccactgcatgtccttgttggttggactggggctaatagctttggggcagatgttagaagcaaaactggagtgtcatggtttttttgtttttgtttttgtttttgctcagatttgtcttcttagtgcttggatggtgtgagtgaaaacccagaggaatacatttggtggctgagctagtacaatgccatcaccggtgagtgggaaattcttctttctactgaaatttgtacccctgttaccagcctaagggcagattcatcctattaacatggatgttctaagtgcactcaaggatccaagctccaattaagattccccagggcttcggaatgtttacattggctcaaagagtcatcaagaagtaatgtcctttcaacagtacactaaggcattccagcctctactaaggctgtgtattaagatgtgagaggtttttgtttctctcatccagtctcagggaaatcattcattacgagcctctcatggccttgttggggaaataaattcactcattacctatgttattggcaggagtgggcttgagagtatatgtgggtaggtggtgaaaataagtgagagcaggttatagcccatacaaaggcaagctcagttagtctagtgtttcaggtgttaggggagggctgtttaacttgaagggaaagcagatagggttaggacagaggagacaatgaggaattattcatttatttttcctatctcaaaatcttaatgtcttgagagaataaatgtgaacttttgaaaaacttaaaaagcaaaattaaaattcttattacccttgtccccaaattaacctctgatcaaatttgataactggaagcaactggagtgttgtttctttaattttggttgtgcattaagtgatggagtataggaaacagagtaaatttaaaactctgaggaaatttttgaagtggagagaccaggacaatcaaaggattttttttcccctaaatctagagacaacatgaagaaacaaaatagaatagtacctagtgcattagtccattttcacaccgctataaaaaactacctgatagtgggtaatttatgaagaaaagaagtttaactgactgacagttctgcaggcttaacaggaagcatgactgggaggcctccagaaacttacaatcatggtggaaggggaagcaagcaccttcttcataaggcagcaggagagagaccaaatcaggaaatgccacacactgttaaatcatcagatcttctgagatattactagcatgagaacagcaagggggaagttcacccccatgattcaatcacctcccaccggacccctcccccaacatgtggggattacaattcaagatgagatttgggtggggacacagagccaaactatatcacctggtgtttgaagatcccacataaaattgagaaaggaaatcctcagaccatggaaagtggcaggatgagaccatctttcagtactgaagtcttagagtccctggcttgtgctgctgagccattcatccttatccattaacagtgaacacctgagttgtgtagacataagaggctgcatctgctgataccaagttctatatgaaagttgttcacacaactgagtgttctcagtcatttcatgaataatgtatttgtggcttgtatctaaaaagtgatagataggaaccactttacatactatctcattggacctttttgaactcataacaggtctttattttattctgaggacactgaggtcctatagtggaatatctaactatagtcttgattaaaacgtgacaaattatggatgctgcctcccttgtagtgagtctatagattttcttgaaggtggtggagaggagaattttagttctaaatttccaagtacagatttcataattagtatctgtaagttatactttagaagtctattgggaaatcttcaggttatattatgccacaccacatgtgatatttctctatgtgaagttttatgtatgagtaaatctgaaagccagattcccagttcagatttaaagcaatgtgacaggaaccccaaacactgttttgagttttctgttcataccacccacacttccttagtacagtcactttgatcttgctccactgaacattggcagagatagccctgtttgcagtagaatgtccataatgttttaggattccatgaccttcgaggatatcattgtagacttcactcaagaagagtgggccctgctggacacatcccagagaaagctgtttcaagatgtgatgttggagaacatcagtcatctggtctctattggtgagtctctttatatttattatgtatgtatatacggattcattcactcactcatttttcactgattcattctttcattctacacgtgcttagaacagctttctcatctatcacttcaacttctgctttgatcctttcataactctcacaattacctgacagccatttctttccttttcacttatattgatttgtcctctctctagaaagtcatctttctgaccacagtttcacatccttcttgctctttaatctcccaaactcagaaaagttatggtaattcactgctttggtatgcataaataaatgtattgatttctttaaagtaattattctatcatagggactgttctgcacagaacctagattgttctggtggagctaatatttattgcatagttttttaatataatgtcaaatactatgacaatttgtaatttctcactaagtgaaaacactgaggattctgaaatcagtatttgaagtgaggcatggccatcagcaattataggtcttttatgtctgggaacaagttcaagagttttcattttgctcgtgaaggactgtcaatgttgtcttcaaggtactcttcccaggctgaccttcagtggctaacttatccttcccagtaggctgccctgtatctgataaccttgtacatttgtcagcacagaactcaaaatccatgtatctttttccccaaaacaggcaaacagctctgcaaatcagttgtgctttcccaattggagcaagtagagaaactttcaacacaaagaataagcttactgcaaggtgagctctaagaagcagtgcttcaataggaggaggagaaacatggccagtgagtgagtaggacccaacagttgccaaaggaagatttcttttgtttttttagacagaatctcactctgtcacccaggctggagtgcagtggcgtgatctcggctcactgcaacctctgcttcccagattcaagtgattctcttgcctcagcctcccgagtagctaggactacaggtgtgcgccaccatgcccagctaatttttttctatttttaatagagacagggtttcaacatgttggccaggctggtcttgaactcctgacctcaagaaatccacccacctcagcctcccagagtgctgggattacagtcatgaaccaccacgcccagccggaaggtttcttaaatttgcagtgtttctgaaatgtaggcaaaaacctgagggaaacatttctcagatattgtcattatactttgtaggtatcaatttttattcaagtatctctctgtcattgtctttgtcttttgtaaaggggatatttgtgtacttatttgagttaaactattacatactagccctttataatggtcctcttctttgaaaatttttctttccttcctcgacttgcctttatttttttatatgctgaaaatgtcagtagtcaatgtgctataatactcttctccttaaagtatggttaatttaacattctttccctgtctgtgtgtatttgaaacacactcaaatgggctttggagctatttaacatttttattcccctaatgcctatatagcatcttttttttttcatttatttcaggtagagaagttggcattaaacatcaagagataccattcattcaacatatctatcagaagggcacgtccaccatcagcacaatggtaagctttatggatgcaaaccctgttcttacatatagaaacctggacattaaacaactttggaatttggtacaggtacctgactgtacttaaagccctcccagcagttttagatagtttggatttagtgaagacgttaacttcaaatcaaaaccataatatgaggccttatgacaggacaactgtacaaacttgactacgtgctgaaactttcaaacatgataaagtcttaataactagtcagatagctcttcagttgggatgctacaacaggaaaactctctacatgcagttagataatatactacgtttgtataactgatataggaacaattgtaactggagtctaccactgaatgattattctagaattaatatgtagagaaatgaatgaagtaatgaatgagtgtggataaacctttaatagtctttcatttcattcccaaaaccagagatctcatactcaagaggatccttttctatgcaatgacttaggagaagatttcactcaacatatagcattgactcaaaatgtgattacctacatgagaacgaaacactttgtaagcaaaaagtttgggaaaatcttcagtgactggttatcctttaatcaacacaaggaaattcacaccaaatgtaaatcatatggaagtcatctatttgattatgcctttatccaaaactctgcccttagaccacacagtgtgactcacactagagagataacattggaatgtcgtgtgtgtgggaaaacctttagcaaaaattctaatcttaggcgacatgagatgattcacactggagagaaaccacacggatgtcatctatgtgggaaagcctttactcattgctctgatcttcgaaaacatgagagaactcacactggagagaagccatatggatgtcatctatgtgggaaagccttcagtaaaagttctaaccttagacgacatgagatgattcacactagagaaaaagcacagatatgccatctatgtgggaaagccttcactcattgctctgaccttagaaaacatgagagaactcacttaggagataaaccatatggatgtctcctatgtgggaaggctttcagtaaatgttcttaccttagacaacatgaaagaactcacaatggagagaaaccatatgaatgtcatctatgtggaaaagccttctctcattgttctcaccttagacaacatgagcgaagtcacaatggagagaaaccacatggatgtcatctatgtgggaaagcattcactgaatcttctgtgcttaaacgacatgagagaattcacactggagagaaaccatatgagtgccatgtatgtgggaaagccttcactgaatcttctgacctcagacgacatgagagaactcacactggagaaaaaccatatgaatgccatctatgcggaaaagccttcaatcactcttctgtccttagacgacatgagagaactcacactggagagaaaccatatgaatgcaatatatgtggtaaagccttcaatagaagttacaactttagacttcatagaagagttcacactggagagaaaccatatgtatgtcctctatgtgggaaagcctttagtaaattttttaaccttagacaacatgagagaactcacactaaaaaagcaatgaatatgtaagaatcatcagctgtagcgttaacactaaatacaccaaggacaaacatactacaggaatattatgtctgtaatcagtgtggaaaagcctttatttatatttaccactttgctcaacctaaatgaattcaaggtagagagaatccagatgtatttaatgtttatggcacaaacttcagactctaggctgaccatatacaacgtgagagaatgaaactatagatcaaaggaatgtggaggagtcttcatccacagctctgttaaataaatgggagaaatcacatcacgaaaattctgtgcctgtcgtcagtgtgaaaatgcctttgctgataatttatcctctaaacaaatgagtaaaatccacaggcaagcaaccatatgtctgtaattgctgtgcactctcattcagctaagcaccaattttggtgtgtgcaagaaaattcattataaggtaactgataaaaacaggaaatatgtgaaaatattttttattaggtggatgaggcctcttgaacaattccagacattcatagtggagaagttattcaatgaaaactcatgagaaatccttttcttaatacagcagcacttctataatagatcagaattcacatggtgtagaactctcaatgacatgaatggagggtagtcctcagtaaattactcattccttagtcaataccagcatttttccagtgagaaaactatcttgacaggatagtggaaaaaccttcaggcagcttttatgtcaaaaaagtgagacagggatgaaaactctaaaaagccattgatgagatgtatagctgggggacaaaacataaagccatcaagcacgtgcttgagaaaaaaattataattttgaataaagactttctacttaaaatatgtgggttgaaatgtacaattctgaaataacctgggaatattgaatgcagaattatgtaagaagtaataagattaaattagtactgtcaaaaatacaagcattaagtgttgttgctgaataatctaataggtttattaaaatctgtgttttttgttttttgttttgagacagggtctcgctctgtaacccaggctggagtgcagtggcgcaatctcagctcaatgcaagctctgcctccttggttcatgccattctcctgccacagcctcccgattagctgggactacagggacccaccaccacaccaggctaattttttgtatttttagtagagacagggtttcactgtgttagccaggatgatcttgatctcctgacctcgtgatctgcctgcctcagcctcccaaagtgctgggattacaggcatgagccaccgcgcccggcccaaactctatgtttttaattcagttttaaacacatagatttgggtcagttagaaaatgcggatgggcatggcgggtcacacctgtaatcccagcactttgggaagctgatattggtggatcacttgaggtcaggaattcgacaacagcctggccaacgtggtgaaaccccatccctactaaaaatacaaaattagttgggcatgatggtgtatgcctgtagtcctagctattcaggaggctgaggcaggagaatcacttgaacccaggagatggaggttgcagtgagccaagatcatgctactgcgctccagcctgggcaacagagtgagactctggctcaaaacaaaaagacagtgacattcaatggaactaatacacatagaacacaaaattataggtcctaactatagtagtggtatatatgtacatggtaatgattaagtcaaacatggattatgaaagactcactttaaaagtacagtcttatggtgcttaaatttgcctttttgtttttaaaccactttatcaaagtgtaattgacaaaagctgttacttaatgtatacaacttaataagttttgagataaggataagcccaggaaaccatcaccaccaccatctgtgccacaaacattcattctctccaaaatttccttccctcatttttcattgttctctttgtgataaaaccacttacatcacagcaacctgtagcaaatttttaagtatataatacagtattgataagtataggcaatatattatatgatttaacattgcaaaaataaaactaattacaaatgaatctatttaaatataatttggcagtgctggataattgtggttacatttgcatgaatgtctcccagaatcaggtatgagcatcataacagagatttttgttgccatgggctttttttctttaagaacctttctgttctgtgtgtaaatgtttaatattctcacttctcacaagggctatttatggaatcttagcttatatattcctctctagcctctaaagcttacactttaaattaatctgttttttttttctttttttgtttcatctttattcactccatcctacccagaagcagaaaccccactattttgcacaaaacaaaaatgtcagcttatttttcctccgcctagacaggccatctttcttctgggaccttatgttcccttcatgttaattttcaagtgcttgagaaaatccagtgtgatacttcattgactctcccctttctcatgaattctacctcagaaaatcctgtccgaacaggctaccctcatgcctaaagcagctgtttcatgtatttcgtttaagttttgttactgttaatggtgggttggtccaataacatccacagtcatgctgggaacaaaaattttttactcaaatattttaagccaaataatgcttattctatttttatgggtgaaataattaaatcagaattttcacaataatgactatttctatacgaaaaagttctccactgttcacagcttaacatcacattaaatccattggtgtcagctgcctcatttaccacatgcgaccataaggcccggctcttttggcctgtgacagaagtcagtgtattttctccctgtgccacatgtgtccctgctcccagtcctgggtttctgtgttgatgccgaggtataagatacccatagtaagagcacacacatgcacagccagatttcctttgatatcagattaagaagtggttcctgcagaaatttttagataagggctagtaagttttgagtcatcaggtcattgccatggaaagggaggtaacccctgggtattgccatggcagtggtaaatagatatggcagactggtgggtatctctggaaagttgcttttgctatggctttgttttagctactcctcaatctggtccagtgtctgagccctacctctggagtcaagtcccaccccctacctcatcctctcctcagagattagatattcctccttaatcttaagggtgctgtagaagggcagaagtctgtattctgtaactgcttcctgctgagcttatgggcataggccctgcctagcactggaggagtaaaaatccctgggtacaggccgggcacggtggctcatgcctgtaatcccagcactttgggaagccgaggcgggcagatcacaaggtcaggagatggagaccatcatggctgacacagtgaaaccccgtctctactaaaaaaaatacaaaaaattagctgggcatggtggcgggtgcctgtagtcccagctactcgggaggctgaggtgggagaatggcatgaacctgggaggcagagcttgcagtgagccaagatcatgccactgcactccaggctgggtgacagagcgagactccgtctcaaaaaaaaaaaaaaaagaaaaaagaaaaatccctgggtacctcaactaagggacccacaggcaggacactttttcattctctgggtcagtaaacaggatggttggaattcttctgccagcattgtctttacctggaagttttgtaatctagaagacacaaactttactaagaggttaaacaaggaagtgacaaagaatagtaagatagctatcaaaggtcctaggagaggtaaagaccagtgagacttgggaaggtacttttcatagatgaccagatacagttgggagtcagtgccctgattatgtaaccaggtaacttgctcatagatcttttgaatgttaatctcaacttgtccagatttgttaatatacatgcagcaggttttactaataacttcacagactcctccttgttcagctagtaaataattcaacactagtctcttatagagaactaaatttgccaaagagtctaaggacttgatttccctttaatgcctgacctgtgatagtggctaagctttctaagggtttgagtcaagttccttagagttaagtcatggtagacaaagctgccccagggtgctgctaatcctatcactgccctcatttctgccagaattaatcctatcgcttgcttacttctggtattcttgggtctattggggttatagacagtgacccctggtgagtcaagggggggcaatgtacattcacttctgttccaagtacttgacaaagaaaagctactcctaaaagaacaggtgactccctagagttgggagtggttacagattctgatttattcccgttcatggccacaaacagaagccctatggggtatgatgtttattctttgctgtcaagttgggtctatagagatattttctccctgttccagtgggggtggtcagataatctttgtttcccagaagtgggcagtacttccaccttcctggactgggcagtcatttctcctttgtatgttctgatccagaaatcaccatatatgttttcttctcacttacaagtggaatcccacttactgcagccttggaaacttgacaactatagttggatcagagagcatcactccacttttgtgtcattaacacagacgtgagagcaaaggatagaatcatttgtgcactggagatatggatatctaacttcccaggtccagggaatagtggtggaggaggggttcaagtggaatacattaagtgggtgagagctgcacttaactagtaggggtttgattatttctggattgctatggttagttaggaggccaggggggatggtcatgagattttccaggtaagccagaagatataactctctatcctggggatgttgatgacaaatctaacaactgtgaagatgattccctgatgctataatcttagaaatctttactatagagttatgttctcacccacactggatcagggtaattggaagagcaaacatcaacagtgacaacatggtgtccagctaggcattagcatggtctctatacccaacaaggacaaaacaggtgttttgcagaagttggctaaagcaacataaaagaagttcaattaagaagaagagaaaaattaagctcctattcccacccacagcatcacatttccacttttagctgagtgttgaatcttttaaataggtaccagaggtcttccaaaaactcatagatgtaggtcatgatgtcctctttttgtgcctgtgactcagaaacaggtttaatcatggacaggtatacccaactggttcttccctgaagtttcacagtggtgggagtactcaataaaacctgatagtgggccttccattttggttgtagttgatcttcaggggatatttctttccaagttttcagcaaaactgcatctcctggttgaataggggggttaattcttttattaatctcctggttgaataggggaggggggaatactttgtttccatatgcttggagggccttttgaacctggcttcttcaggcagcggggaataggggcctgggcttgttggataagtgggaggggttcctgatgactttggagtgtaattctgcaccaaagaactagtggggtccccctcaaaagtaggagactggggaggctctgaagtgggagcacagatctcagaggaacagctaaaagggggtcatctagggtatctggtgcagcttcagacacattctacagctagcccttagattaggatcctggtagagggaaataaaagcctgcacatagcaaacttcttaccattttatttccttttcacacaacaaatctaactgtatgatatcattataatgtaaagaaccgtgtctagaataaatatgttggtttatcaatttttattgaatccaaacattattgcaatagtaaacaaggtttttctttttcaacctgtctaataatttgaagctactccaatggcctaaatgacacccgagtggcgagtctttttgaatgcttactgttgtccccatgtctagtaaggctcactacaaggggttttagttagcctaagtttagcaaatgcatacttacttttcccttttcatttcccactttctatagttgccaaggtgttacaaaagtagattaggaaaacctagccaataccaatcaggacataggcgtgggcaaagacttcatgactaaaacattgtagggaaaagaaatagagatcagactattactgtgtctatgtagaaaggcaagacataagaaattcaatttggacccgtaccttaaacaattgctttgctgaaatgttgttaatttgtaactttgccccagccaatttgacccaactttgagctcacaaaaacatgtgttgtatagaatcaaggtttaagagatctagggctgtgcaggatgtgccttgataacaaaatgtttacaaacagtatgcttggtaaaagtcactgccatgctctagtctcaataaaccaggggtacaatgcactgcgaaaagctgcagggacctctgccctgaaaagctgggtattgtccaaggtttctccccatgtgatagtctgaaatgtggcctcgtgagatgagaaagacctgaccgtcccccagcccgacacctgtaaagcgtctgtgctgaggtggattagtaaaagaggaaagcctcttgcagttgagatagaggaaggccactgtctcctgcctgcccctgagaactgaatgtctcagtataaaacccgactgtacatttgttcaattctgagataggagaaaacccccccctatggtgggaggcgagacatgtttgcagtaatgctgtcttgttattctttactccactgagatgtttgggtggagagaaacataaatctggcccacgtgtacatccaggcatatacctccccttgaactgaattatgacatagattcttttgctcacatgttttttgctgaccttctccttattatcaccctgctctcctgccacattccttttgctgagataatgaaaataataatcaataaaaactgagggaactcagagaccggtgccagtgcaggtcctctgtatgctgagtgccggtctcttgggcccactgttgtttctctatactttgtctctgtgccttatttcttttctcaatctctcatcccacctggtgagatatacccacaggtgtggaggggaaggccaccccttcaaacatcaaaagcaatggcaacaaaagccaaaatagacaattgggatctaattaaactaaagagctcctgtacagcaaaagaaactaccatcagagtgaacaggcaacctagagaatgggagaaaatatttgcaatctaccctatccgacaaaggactaatatccagaatcaacaaagaacttaaacaaatttacaagaaaaaaaacaaccccatcaaaaagtgggcaaagaatatgaacagacatttctaaaaagaagacatttatgcagccaacagtcacatgaaaaaaatgctcatcatcactggtcatcagagaaatgcaagtcaaaaccacaatgagataccatctcacaccagttagaatggtgatcattaaaaagtcaggaaacaacagatgctggagaggatgtggagaaataggaaggcttttacactgtcagtgggagtgtaaattagttcaatcattgtggaagacagtgtggcaattcctcaaggatctaaaacacgaaataccatttgacccagtgatcccattactgggtatatacccaaaggattataaatcatgctactataaagacacatgcacacatatgtttattgtggcactattcacaatagcaaagacttggaaccaacccaaatgtccatcagtgacagactgaattaagaaaatgtggcacatatacaccatggaatactatgcagccataaaaaaggatgagtccatgtcctttgcagggacatggatgaagctggaaaccatcattctaagcaaactatcacaaagacagaaaacaaaacaccaaatgttctcactcataggtgggagttgaacaacgagaacacatggacacagggtggggaacatcacacacacactggggactgacaagggtgggggctgggagagggatagcattaggagaaacacctcatgtaaatgacaagttgatgggtgcagcaaaccaacatggcacgtgtatacctgtgtaaaaacctgcaggttgtgcacgtgtaccctagaacttaaagcataatttttaaaaagtggattatgagcttcaaatgggcagttggattttgaacctaaatgccacagacagcaacggttggtagagaggtgggctcaaaaatggaagggagggactgtggaagggagaaatggaagaggtaaacagtgctgcccaaggggagacctcagaggccctgacctgctgggtaacctatcccgtagcagagacactgaaaaaaatattcacgtggccaattgcctaccactgtaggtggctctccattatgccaggggcctgggaattcccatttccttggaccaagagtggcttgagcaagctagttggaagacagcataaaggaagggttagcagcttgctattaggaaaatacttctaacttatagggcagaaaagggcaagaccaatactcccctagggagagggctataactcatatatccctcagaatcctagagggaatgtcaacacaaatactccagatcatatggggggtggccagaataccaatgttgaaaactcagaaggcccaagtttcagccaacaagggtcccttcaccaaatcctgaaaaccctggggcacccagaatgcggccaacagtcaatccaagaccaaattggggtcagcaaacaacatgactctagcatcccgaagtaaaaacagtggggatctctcacaaccaagtatcctgccttaatcgtccccaaacaattaacagaaaggtaaaaccaaacataagactgcacacattttaggactgaaaataaaataactaatggaacaacacaatggagtccgaagagaaagtactcagggaaggggtgacaaggacatgctctagccaaagacgtttatttcatttcctagttctcctgatactatggcgatgggggcataagggacactcacctgtccaccagagcacatatggtgctgactgattttccccatgggacccaggtgaagatctcgccaggatacctcagcttgggtggacttaactgccacaaagggtgggtcctgcacagggggggcctgtaacccactggtcggccagtcagacaggtgggtgtcacataaggtggtgacactatggctgccctgccagtaggctcagctgccgcagtgggaggggcctgcactgtgtcagtaacccaccaggctgcaaattttctgaacttttatactgtgcttcccttataaaattgaatgcctttaacaccacccaagtcacatcttgaatgatatactgctcagaaatttcttctgccagataccctaaatcatccctctcaagttcaaagttccacatatctctagggcgggggcaaaatactggcagtctctttgataaaacataacaaaagccacctttgctccagttcccaacaagttcctcatctccatctgagaccacctcagcctggatttcattgtccatatcattatccgcattttggttaaagccattcatcaagtctctaggaagttccaaactttctcatattttcttgtcttcttctgagccctccaaactgttagaacctctgcctgttaccgagttccaaagtcgcttccacattttcggctattttttcagcaccatcccactctactggtaccaatttataatattagtctattttcaccctgctgataaatacatacccgaggatgggcaatttacaaaaaaaaggaggttaaatggacttatagtttcaccttgctggggaggcctcacaatcatggcagaaggcaaggatgagcaagtcacatcttaggtggatggcatcaggcaaagacagagctgtgcagagaagctcctccttataatatcatcagatctcatgagacttattcactatcacaagaacagcacgggaaagacttgcctctattattcaattacctctcacctggtccctcccacaacaccaaccatgcttggctaagtttttagttctagtttcatagagatggggtctcactatgtttcaggctgatgtcaaactcctgggtaaagagaccctccaacctcagcctcccaaagtgctgagattacaggcgtgagccaccaaagctggcccgtttttcttgatatatcaaaattattccatacagtcagataacttttcttttcttttctcttcttttttttttgagacggggtctcggtctgtcgcccaggctggagtgcagtggcgcgatctgggctcactgcaagctccgcctcccgggttcacaccattctcctgcctcagcctctcgagtagctgggactacaggagcccgccaccacgcccggctaattttttgtatttttagtggagaccgggtttcaccatgttagccaggatggtctcgatctcctgaccttgtgatccacccgcctcggcctcccaaagtgctgggattacaggcgcgagccaccgcgcccagccagtaacttttcatgtggttactaacagccatggatttccctgtccaaggtaccagtttttcggttgcatttctctatatactcatagccgtggacactgtctacctgtctgatgaaattcaagtaaccttttcattaggtttaacttccaagaaatctaaatgggtttcttataaacaaaagcaatcacactataggaaatttttctttacctttctcacaactagcctaaaagacaaaaataaagattgtacatgttatcaaggcaattccttccttgtcttaattgggttttagattagttaggaaaagagctataaaagggttaatgtttttacatctatgtaaccttctgtattgctattatttaacagtgacccctgattctgtttgattgagtgttttgagtcttctgacatctttggcaggtttcttcaagattaaaaacctatattaagtctttttggcctaaaactaacttcgggattttgaaggttgacccctggaaaccctcaaaaatattgcctcttaccttatagagattaaatggttagacttatctggtaaaatatatgggcgacattttaccacacagggcacaaaggatatcaagtaataagtgatggaagatctttcagttacacttataggtatgttattgatataaatgttcctgacataaatgttccaaaaatcatatatattgatgaaaatctgttgtcagccatacttttgttttgttaaatatcttctaaagttatattcatataaatatgttataaatgtaagtattctaagattatatacaacttataaagatctcagggacctgatgcaaagctgtaagacatgattctggttgttataaaatgctacatataataaatataaccaaattttcttatgaattgggaacttttgtcagattttaaccgtggttaggattagcacagtggctcatacctgtaatcccaggacttcgggaggttgaggtgggaggatctcttgagcccaggagttccaggccagcctgggcaacatagtgcgaccatgtctctacaacagaaaacaaagttagctgaatgtggtggcatgtgcctgtggtaccaggtactcaggaggctgagatgggaggatggcttgagaccaggaggtcaaggctgcactgagccatgattgtgccactgcactccagtctcaaaaagattaaaaaacaaaatttataacagtattactgttccctcaaaagctactcctacaggagtggcacaaaggatatcaggaaaaaaaaaaccctcttaaatgctattcccattgtcttcccacagaaaattgcctggtccattatcgagtcatgaaaacaaacaaaaaggataaaccagttccttattacagagctggactaaaatcttatatataaaaccattctaggcttaaaatacataatgaaacaactgaaatgccttacagccttttaaatgaataaactcttaacagagcttggagaccagattaaaaaacataagattggatagaaagtcattgatatgacccaattggtcactacgagtaagcgctttgaaagacttttagaatcataaaaaatgctaaaagaaagaataaacaggctaataaactaatatctttacaagtacaaaagctacaggaacagacctccttatatctgttataactcaaaactgatatgtcctaaacaaaggaaacctgggtaagctctatacctcgagatggctgcattcattgtaaacaatgaggtccctggaagacatgtcatctgctcttggagtagtcctctaataggctggctccttttgggccacacagtattcccatcagagaaagtccccgagggtttgacaacaatccaccctgcaggggtggaggacctgaggaattctctggtgaggaacttcctgtaataccttttttttgaaattaaaaaaaatattgtgggtacatagtaggtatatatacttatggggtacatgagatgttatggtactgatatgcaatgtaaaataagcacatcatggagaatggggtaatgcatcccctcaaccatttatcctgtgagttacaaacaatccaattacactcttctaattacttttaagtgtacaattaagttattattgactatagtcaccctattgtgctatgaaatattaggtcttattcattctattttctgtacccattaatcattcccacctcccccctgccagctcccccttctaccactacccttcccaacctctggtaaccatccttctactctttatgtccatgagttcaattgttttcttttctttctttcttttttttttttttttgagacagagtctcaccctgttgcctaggctggagtacaatggcgtgaacttggctcactgcaacatccgcctcctgggttcaaacaattctcctacctcagcctcccaagtagctgggattacaggtgcccgccaccatgcccagctaatttttgtatttttagtagagatggggtttcaccatgttggccaggctggtctcaaactcttgacctcgtgatctgcccccacccccaccttagcctccgaaagtgctgggattacagttgtgaaccaccacgcccagcccaattgttttcatttttagttcccacaaatacgtgagaacatgtgatgtttgtctttctgtgcctggcttaatccacttaatataaagatcttcagttccatccatattgttgcaagtgactggatctcttagttttttatagatgaatagtactccactgtgtatacataacacattttctttatccattcatctgttgatggacacaggttgcttccgaatcttagctattaactaatactaagatgatgaagattcttgtacactatttgtggtcactggagtcactgtattcactttaataacaactctaataaatcaaagtatccctctgagtaaaaaaatacttctgtgatgggtgtttcaaatcctatccagggaatccccatgtctcaacctgtccatatcatgcttggatcattttagaaaaacatgctttcctactatgtgatactgccccaggaaatgtgatggaatgacatttactttctgagttgagagaacacataacattctgtttcaagggagaaatcatcttggaatttccggattctccagaacacaaaattattaattaaattattaaaagaattaaacctataaaatatcaaatagactattctaagccattgcctaaattttcccaatatccactaaaattggaggcagttcagggactttcaccaattatagaggaattaattaaatgaggacttataattccttcactactccctacaacattccaatcctaccaatcaaaaatctaatggacaagttggagacttgttcaaggtttacgtgcagtaagcaaaactgcaatcccaagatttcctgtggccctaaatccagaaaccaaacagaggaaaatttaatagaaccaggtctttatggaggtcactgtcaccacatctgagtaacttgggtgcagaatctggggacatgattgactttccttaattggatctacacaatttacctgaggagaaatgttttgctaaagaggctagccttgattagatttggcttaacaggagccaagttattcaggtgggtcccttggattatacagttgatgagatgataggactgattagcatatataattgatgaggttatcaactgcataaaaagagggctcaccactcacatggtgctttcccaggagagtggaagaagctctgagcaccggagtgtggtgacagcgacctccataaagacctggctccattggattttcctgtttggtttctggtgagtactggagaaatttttaccagggcagacgcatcccatttattttcgtcaataaattttaacgtgaaaattattgtttaattggactacaggtatttggtggcaagctctctgagaggagtttaggttactgtggacatgtaatttctctcgaattctagttcatatgtaatggtcagagaaaaacttacctaatcttggcacacaggagttgatttctctgggctgggcatgttggttcatgcctgtaatcctgccactttagaaggctgagtcgggaggatcacttgaggccagaagctggataccagcatggcaaacatactgaggtcccatctctacaaaatataatttaaaagttacctgggcatggtggtggctcatgcctatagtcctagctgcttggaaggctgaggcaggaggactaccttgagcccaggaaatggaggttacactgagctgtgatc

SEQ ID NO: 97 - DNA, 140 bp, Human
  misc_feature (20)..(20): n is a, c, g, or t
  misc_feature (63)..(63): n is a, c, g, or t
  misc_feature (72)..(72): n is a, c, g, or t
gcggccgcgtcgaccgcggncgcgtcgacggcaaaggagactgctgaggctgttgctgatganatactgganaaggctgggccacttgttgctgtgtctgctgttgcacttgatataactgcctacccctaaaagccaaa

SEQ ID NO: 98 - DNA, 492 bp, Human
ttttttttttttttttttttttttaatataattatttattgtaatcatggtttatagaaatcacattttttatagattaaaaaacttaaaaataaaaaagtactaagttaaaaaaaactccactaggagattactaaaactgtaggccacattcatcttcctacaattcttcacccacaaaataaaatccaatttaggaggctccattaactcttttaatatatttctaaatcttaaatctatatttcaaaatgaacatggtacttcatatgggcccacttttcataattctttcaactcaatgttttagccaaaactgcaaacatttgaaatttaattttgaataaaaattacagcttatgcaccaagataacattagaaagtgtcttcagacattttatcaggtattttcctcattacacccaaccaaacacagaaagaaatatatatttttgaaatgtcaattactgctatgctatcaaaagctgacat

SEQ ID NO: 99 - DNA, 275 bp, Human
tttttttttttttttttggcagagcagttgccagaactactattatttggttttttttttggttttggttttttttttttttttttttttttgcaaactgcagttggacaagcatcttaactgcttttatctgaaagaggggggaccactgttgtctcagtcacaaaaattctgctgagtgtctttccactggaaataccataagataagctctcataagacaatttcactattccaagggcagaatgtggcaaaagtggggctgctgctagctt

SEQ ID NO: 100 - DNA, 222 bp, Human
tttttttttttttttttttttttttttttttttttttttcctttgacagtgaccatttattacacacatcagactgggggaagaccattgacatagctgagcaccaggtagggtgtcctgggtattcgggcatgagagcagcaggggcctcctgacgcgggcaggagaaacatggcacccaccaggaggaggaagaggaggaagaggataaggaggaaggtc

SEQ ID NO: 101 - DNA, 440 bp, Human
gttctgctcttggtgcttttgtttttgttttattttgtattgtatgaccttgaattacaagtcttcccctcccaggaaaggactgttcttcagggctgtcctcagattcttatttcatatcttaaaaatgacatagtaaaaaagacctagatgtgatagtaaacccttattttttaatataccaaacagttgtaaccacaaaagcactgtaatcatcatttcttggaaaagttataagcatatttgaaacttgaaacttctaaaatcttggttagagaagaaaactaaattctacatttagtggaattaagcttctacctaatagcttttataccaactttccaaaagtaggagtggtaccaggtttccatgtaaacccaagaaagcagtttatccatccacacagcccaacccttgctccaatgagcatattactgggt

SEQ ID NO: 102 - DNA, 559 bp, Human
  misc_feature (548)..(548): n is a, c, g, or t
aattcgcggccgcgtcgacgctgcgagaagacgacagaagggccattctactaattttaaagaacatcttggaattttacactcttggaatcatagtcgtagaatcctttttttgagacagagtctcactctgtcgcccaggctggagtgcagtggccagatctcagctcactgaaacctcagcctcccaagttcaagtgattctcgtacctcagcctcctgagtagctggaattccaggctgtactcactgctttgctcatatccccgctcattaccagggacaggccagcacccctggcattgcatctcacatatccactgatggatggagaacagactgaaattcagtgccttagagaccacacactccaaccccctcattgtgcagatgggaaaactgagagccatagaagggaagtggcttgcccaaagccacacttactgttttccccacactgtaccacaaactttcaccattcttcaggtttggaaaaatactaataaactgatcaacactaaaaaaaaaaaagcggccgctcggttgtngcgcggccggg

SEQ ID NO: 103 - DNA, 388 bp, Human
tttttttctcccagtcatttgattttattgtgtttttactaagcatttttattatcttcatgtagtcaaatgtgtcaatattttgttgccactggatatttccaccacgtttccttctgtatttatatggcttcattttcttacatttggatcctggatccagatggagttcattcttgcatatggtgtgaagtacaggtctaacttcaactttctccaaggggctttccagttggctcagcaccatttattaaagtctgctttgacctgcgattgaagatgccacctttaactcctcatcccccacccctaagaaacctcacggaacatatgacccaagagcagagcagacataaaaagattaactgagctactgagattcggtcaa

SEQ ID NO: 104 - DNA, 545 bp, Human
tttctttttattgctaaagagtattttattgtaaatatatatcacaattctttattctttctgtcatttatgggcatttaatttctttgaataaatttaacaagttgcaaatgaatatttagcaaattgcactcagattaaaataacaaaataatctcttatcagaagctaagaaatacattttcctcctcctcatccatatccaaagacggttctgaaaatgccttttcttctctattatagcaacacctagtggcttgagaaggccaggtctagaggtatgcatttacggctgggaaacactgacctttagctttgaagacctcaggtagcacctagacgtcggctataaccgcataacaatggtccccatctgaaaccatttaagtcagaatctttggaggaagaggccaggattggtaggttataaaagttgcccagatgattttaatgtgcagccaaggctaagagctacttatctagaccagtggtttgcaaacttttgtcaaataatcagaatcgcgtgtcaaacacagattgctggg

SEQ ID NO: 105 - DNA, 580 bp, Human
tttttttttaatgttaacattgagagtcattacggctaaagctttgccttcatcacatagctaaaaagaaggttgagctggaacttaggatactttaaagcatttcctgtttaggtattaggctgatagagaatcatgtgtaactggggtcagcattcctataattttttgagccaaagacagaatacacactttaccctgacaggtttcttccagaatttaggacagctgatgaaatgaaaagacacacacccaagccaagagtgcaaaaggatgtagtagcatgattccgccaaccaaatgcctcataccctcagacgtcccaaatccagtggtgagcaggtaaatttttaacaacaatctttctttgtgaggaaaaaagttcctgatttccataatgtaaatactttcactgactggtttgaagccatcaacacgtcaactaacaattggttcctgcatgtctataagctggctttagcacaccactgcaaacctacttattacttatattttcagatacattacagcacttatcaattctaacattgtgaaaaactgctgtgctttaggcatcttg

SEQ ID NO: 106 - DNA, 618 bp, Human
ttttttttttttaaagttttacttggaatatgtgtatttgctaaagttacaagggaaaatattgcaaattatacatcatttgaaaaattatctctctttagttaattttcagtcacaatattggatgtagcagctccaaatagaggttacctgattattgcttttataattgaattcttaaagagtttacatcataattatataattgtatttttaaacatcacagaaacccaacatgtacctatttgtaatcatcagagtatatacatctgattaggactcagctatgttcaaggcttcatcgagcccaacatacaattatcatttgcattttctgctacaatcaaagaaaacacattgtgtgctattagtggccattgcaagaaggaagatgctgttttcaataacaggaaatcaagaacaaacaaaataatcgtcttccatttaaaaaaaaaagaaagcctacagaaaagtgaaaaggacagggtcctaaaaacatctagtgatgccaataaaatggaatgttttttaaaaagtgatttgtctcactgaagctgcagaagggtatcccacacttatatattatgtgactgcactaaaaacagacgcttttggtgc

SEQ ID NO: 107 - DNA, 538 bp, Human
tttttttttttttcaatttggctatattttaatttttaaagaagggaacatagagctattttgagaaaaataaagacatgaaaggatagcccaagagagtccagtaaaaaaagcagaggcaaagttttccttggcttttggttatgggctgtctgctgaatatgagtcttggatctttttcagcatcaacttgcaaaagctatgcctttccacccttgcccttgtagcttttttgagtccaggtctccccactcccatgccaatggaccctttataatggggaaggcatcacagcaagacgcaggcttggggctttcccaatgaccaggttctcattaagtgccatctcaccatcaaccagcgacagcaatgtcccttttgcccaagctcctcctttccctgcactctggttgccctctaaatggcaccagcccaaaccagggacagtcactcgtccactcacttcccaaatatttacagagcgcctgttgggtgccaggctcctccaggggccctgctgccaggccgaagcccacgg

SEQ ID NO: 108 - DNA, 542 bp, Human
gaaaaaggaatctgtattttatttactcattcatattttagatccagaaccaaagaaaagcaataaagttggtgaaagactcatacaacccacaatgttgcccccataaaaaatattccaaattaatttctggccacaaattctatttttacagcatgtaattgaaaccagattacctttggtttttctaagccaccccctccacccctagagagggggctaaaaagaatgtagtataagtgaatcttgaaagatatccttggattctgctgtctcaaatacagtttgctgcaaaaagtctttgccaactaaactatcattaccttccccgatgctaaggttgaaaatcagcatcttgattataagcctaactttcaagtttctaactcagctgcaaaatattttcccaactaaacctgtggtgttccaaaaatatatactatacagcaatttctaaagttataaatgtcttggcgcatttggcatacttgcttaattccaaaatcattaaaaagacacatttagtgaaaaagtatctcaca

SEQ ID NO: 109 - DNA, 484 bp, Human
cttatagcttttcattatcatttgttaggagaattaagacaaaaattatcatgtgtgtcacaggaccaaaaaaagtgattaaattttttgtttgtttgtttatcttaccaaattgtaacacatgtagttttcttctttctctgtgttctattttattattgtaaccactttggtctttttttttgtataatcaattgcagctagaatggtgtatggctcttaatagatattttggataatgctgagtcccagaaatgtgaagcctttcccgagtattgagttcattaaaggttattatcatcgtgtttaatcagtaagtgattttaactttcttcattatcccctcctcttgtttaactgtggataagtagttcccatggattgcttcctctgtcttcttagcgagaaatatcggtggctatgagatcatagctcaacagcttcaattctgtgctcttcctctgagcaatttttcttcttttca

SEQ ID NO: 110 - DNA, 478 bp, Human
  misc_feature (57)..(57): n is a, c, g, or t
  misc_feature (78)..(78): n is a, c, g, or t
  misc_feature (89)..(89): n is a, c, g, or t
  misc_feature (165)..(165): n is a, c, g, or t
  misc_feature (170)..(170): n is a, c, g, or t
  misc_feature (200)..(200): n is a, c, g, or t
  misc_feature (248)..(248): n is a, c, g, or t
  misc_feature (270)..(270): n is a, c, g, or t
  misc_feature (360)..(360): n is a, c, g, or t
  misc_feature (365)..(365): n is a, c, g, or t
  misc_feature (379)..(379): n is a, c, g, or t
  misc_feature (385)..(385): n is a, c, g, or t
  misc_feature (402)..(402): n is a, c, g, or t
  misc_feature (439)..(439): n is a, c, g, or t
  misc_feature (457)..(457): n is a, c, g, or t
  misc_feature (474)..(474): n is a, c, g, or t
tttttttgcattatagttttataacttgggggatggggcaaaaaggagggagaagtntaaaaaacaaatggagtgggncacaggaattntcagaaatggaggcttaggctgtccatacaggattcagcaagtacttggggactgcgactagaagaagccagggtngggantaagtagctgaggaggagagggagctgatntggaggagagcaagggcaacttcaaggaacaaaagggaagctgcaagnaccagctccattaattcagcanacattccttgtctgtatgccatgccagggtccttgttctatggttctctcagtggggtagctagaaacttgcccaacagacaggaacagncagangccaaagcaaaganttcctnaaaggtagccggcctgntgccaaacctggggacaaactttatggaggcgccgtnttttagccagaccccganttaaaccttggtcccancctg

SEQ ID NO: 111 - DNA, 313 bp, Human
ttttttttttttttttttttttgaggtttatgctcattttattataaaaaaatacagaatccaaagttgattgtgacgggaagagggaggcccggtcgccagctccaggcctggcaacgcggcccgccccgccgaccccctacaaaagccctctgcccaccccccaccaccgggcgtgcctcgagccgccggccggcggtacaacaatatatatttatatataatatatataaaacacagagtcaggaaaggcgggtagaaatatgaaatccgtataaatgtgttgtttccttcattaaagtgtcttcgggga

SEQ ID NO: 112 - DNA, 498 bp, Human
aacgttttttttttttttttttttttgggtgtatgtatataaactttattttattctcttctggggttgtgttacatgacaagaaattgaattaattcaataaaattttagttcgggttgcttaggtttttactgctcccattcttgcttttactaatttatccaagattagatgtgattactatttaataataatttagtcctcacacttacaaaccacttacaataccagcatgcttctatcactgtaattctattcaattctcaggcccatgaggcatgccagccagacgaccagacagcatttattgagtgcccactctataccagccacaaaagatcctgtgtcagaaggggaaacaggcttggaggcttggagtatgtacgtgatagcctccctcccagtccacacaactggtactgctggggctgtaactagaactcaggcctctgcctctcaagctcaaggtcggatgtccatgtgcttctcacgttgcc

SEQ ID NO: 113 - DNA, 590 bp, Human
  misc_feature (450)..(450): n is a, c, g, or t
  misc_feature (515)..(515): n is a, c, g, or t
  misc_feature (547)..(547): n is a, c, g, or t
  misc_feature (558)..(558): n is a, c, g, or t
  misc_feature (570)..(570): n is a, c, g, or t
  misc_feature (581)..(581): n is a, c, g, or t
ttaatattttaaaagcttattgaatcacaagcatttttttattttactgtaaaaacatcatctttatcagggaggggggaaagtacaaaattatgtccctgatatgattcaaccatgtaaaatgatgtacatttatgaacgacgactagaagtgaacatgaataactgaaaacaaacagtgtgatgcaagtgaatttttggagggtgagatggtcattatattgttcttcgagcaattaaatattttattttcttcccaaaacaatgtccacaagggggcagacagaagatgacaaataaaaccatttaataaaaacctcagctgaaaagctaataactccagaatgcaggttgaaagcaagcttaaaggtcatctaggctggggtcagtagctcacgcctgcaatcccaacaccctgggaggcccaggtgagaggaccgctcgagcccnggaggtaaaggccgcagcgagctatgaccgcgccactgcacaccagcctgtgccacaaagtaganttcgtcccaaaaaaaaaaaatcctcctagtcntctagtccatntccccccctggncaagaaggacngaggcccca

SEQ ID NO: 114 - DNA, 365 bp, Human
taaaattctttggattttttattggattcacataaagcaaagaacttactcacttggaccgagaatatattgtaatgttccataagtcataacttaaggaccgagaatatattgcaatgttccataagtcataatttaatgtgcagtaagaacccatgaagttgtctgaccaaaagtaacactcttctgttgggaaagattttacatccttttattctggatgaatcctgaattctagatgttgggtttaatgcttcacacaatggcacatttacaagaggtacaaaacacttattgagctttcagggccactgtaaggggcttgcagaatagcctctttgcaacccagagaattaatctgattc

SEQ ID NO: 115 - DNA, 539 bp, Human
  misc_feature (359)..(359): n is a, c, g, or t
  misc_feature (481)..(481): n is a, c, g, or t
  misc_feature (483)..(483): n is a, c, g, or t
tttttttttttttagtttttggtgattatttaattgcagaagctattatgatataattacttctggtggattaagtgctgcttaaatactaagactatccattcacttttgcctcacgcctctctactaaactgcagctcagttctgcctctcataatatgtatgttgagtaacattatgaccacacagtgctcatcaaaaactattgctccagctgtaattttaaatgttggaggtggttcaaaattctaaagagttatagaaataacacacatttgacaaatacatataaaaatagttataacatattgaaatcacattaaaatatgaaaaacccacaaagcataattgcatcatantatttgtgttgctagacactgtccatctatttttagaaaacgtcttaaatgtcactcaatggggcaactttcctggtttcctatgtcttaccttagaagcaagcagtgtgttagaatggatntnccatgcacgttagaccccaagatacaacaagcttctctatacagaagccatccatg

SEQ ID NO: 116 - DNA, 602 bp, Human
  misc_feature (294)..(294): n is a, c, g, or t
ttccagtgtttgaaccatctttatttaatgaattattgatatccttttttgtttccaaattaaaacttcaccacatattttcagctaaggtaaatctgcttggtccaaacaaaacaaaacaaaacaaaacaccagactgcaacaataacaggaaaagatcctcttcagtgatttatgttgttctcttactttcataactagtttgaatgcaaggctggtaaagggatacacagagaatcattattttaaataacaaaagccattcaaaactctctctacctgtcaaggatgttntatgctcccattcttatttgtttggcagtaaacataccttgcccacagtcgccagcatcaaacccacaggacaagacattgcatgcttggtcacagaacttatcagcgagccaggaattcgcacatccctgattacagtaagagacactgtttattcctccaccaaactgccagggctgtccaactccaatactcccagtacctccacctcctgcaatatagcgactccctccactgtttccagagcaatccccaccatcccaatcgcaggctgaattatttacagccttgtcacaatagccatcctt

SEQ ID NO: 117 - DNA, 351 bp, Human
  misc_feature (341)..(341): n is a, c, g, or t
tttttcggcctcagtctgttctcagaacatactccatcacctggttcccagaactcagattgcgcagtggtctcgtcatcatcggccaggactcacagtgcccgcggcagaggcctccctagacctccctcccgtccagcctcacccgctgcctactctcctcacgcccctgctccaggtcccctggccccatttcgctcgccacgttttcataatcctctcaggctccgggcaagcggcgccgcccgcaatgggacctgatcatataaggaaaatactgcgggctcatccgggggctgcaatggtaacccgaaagcgccctagcctactacaatcaccgnaccccaactg

SEQ ID NO: 118 - DNA, 462 bp, Human
gctaagaaataacttttattaaaaatactgtgctagtacttatgcaattacataattttaactaaatattgtccactgccacaattcgcattaccaaactcatattaccaaattttaggccttgatagagcctaaatgcttcagtcacttcagaccaataacttaattctgttttcacataccttatacactggcctaccaatagctctcaattcctgtcaatactttccccattctgcaaaaagagggccccatccccatccctaatcaaaaccaatgtgttgtacctgaaactgcaaagattaatgcttttcgatgaccactaacttttgaagcccgaaggcctaacttttagacaactaaagctacacactgttaaaattcttgggcttctgtcttattcagcaagctgactcagtaaaattaatacactgtatgaaaaaagctaacatacctacaatc

SEQ ID NO: 119 - DNA, 332 bp, Human
ttttttttttttttttttttttttggtttaaaaataaatttattttattacatgataatattgacagtttacataaacaaagttatttagtgtatgcaaagcaactataaaatacattttgaaaagatataaaaatctttgaaattctttcttgatatcagatctaccaaatttcgagagccaccattgatattttaggatcaaaacaaaatggcttgagagattttgttggtcagccaaactcagtccaggaaaaaagaaacattaaagcattgttttgtgtttttaaaagctctaatggatatttattccaagctcctttcgtatcgaag

SEQ ID NO: 120 - DNA, 473 bp, Human
  misc_feature (373)..(373): n is a, c, g, or t
  misc_feature (429)..(429): n is a, c, g, or t
ttttttttaaaatttcttccagtttgggattgtgtatacacaaaaagctcaaaataaagcaactctgcaatataatcttaaaataatggctactgggggaaattctatcacaaccattgaaaataatggtgacttctcacggagtctgtggcatctgagaacccagttaattaaccaaagtcttgctcatattagcctcagttacccagattaaagcaggaactccggccttccctggactgctgaaaacccaacagattttctcaacatgctataaggaaagagggaaaaattggtttcagctcacacctcatgggctgggaagcttctgggaaggcctccaggccagtggcacactccccaactttatggntaaaaggaggggccaattttcattccccacaggcattcacaaggagttcccacccntccaaccacacagtggttttggacaccaaggttcaccctttcct

SEQ ID NO: 121 - DNA, 525 bp, Human
gagaggtgatataatttatttttcttttccatccaaattatcagtaacagtggctaaatggcaagataggctaaaaaactctaagtgacccaattttacaaattaaagaagtaagtaaacattagaatgaatacagttaaacaggagaggctgggcacagtggctcacacctgtaatcccagtattatccagtaaaagtttagcaagcaaattcaaagaagtctgttgtgcaaccatagccctttgcagtagaatctgctatacagcctattatgagggatcaatttctttctttcttcttttttttttgagacagagtcttgctctgttgcccaacctggaatgcagtggggtgatcttggctcactgcaacctctgcctcccaggttcaagcaattctcctgtctcagcctcccgagtagctggattacaggtgtgcaccatcacacccagctaatttttgtatttttagtagagatggggtttcaccacattggtcaggctggtctcaaactcctgacctca

SEQ ID NO: 122 - DNA, 849 bp, Human
  misc_feature (598)..(598): n is a, c, g, or t
atatgtatattttcctctgattttatgactgatttacaaattaggagtgcaaatgggctgttccccgatagcatcttctgggaagaatccaaccaagatacaaagcagatgatggtggatcggcaaactcttttctatgaaaagaaaaaccagatataccagggactggaaagcacctgcttgaaaattgatatgagcatgtctgaatttttcccttataagagcctgagtattgtaacaggtctcttgcacagggggttgaaaaataaaaaaagaagttaacataattaaaatgcttggacaaaacatttgctttatatagattcttacaagtaatatttgattaggtatcaaaataggtttaggcaggtggaagttctgaatttcaaggcaaataaggcatgaagggtggaacattgcatctagggaaaataagagaaataagtgaaagtctgaccctacattgccaattctcagaccaagtacaaagtattaggaattttttatatcagctgacatctttgtgcttacagtaaagccatattagatgcacacatagtgactttattaaatcaaatgagtgtgcagagcagagcanatctaattaggctttctcttttagagttttcttattttactcttattagctccctccagttggtcatcaatttcctatcctacatcagatatttacactatcagattctttggtttaaaatcctcttccggtttacattttaatttctggggcgctaaacacatacttctgtcccggtcttatccctctattggaattccccacagcgtgggcaaaaacgcgggctcgaaaaatggggggccccttcccct

SEQ ID NO: 123 - DNA, 454 bp, Human
  misc_feature (433)..(433): n is a, c, g, or t
ttgtgagcaacatcggctgtttattcacttgtgtgtgagtgggctgagtccgagaaaggggtcagcaaaaggtggtgggattatcattggttcttataggtttgggataggcggtgtagtcaggagcaattttttacaggcaggggatggatattacaaagtacattctcaagggtggggaggatgttacaaagtacattcacaagggcagggagggtgtatcgtcacaagggcagggaggatgtattgtcacaagggtggggaggaatgttacaaagtacattcacaaggacaggagtatcacaaagtacattatcacaagggtgggggaatgtcaccgtggcttgaccattagtgcagccagctccagaggaccttaccaaaaagtttccatacttgcacgtgttttcctggtggccaaaaatataaaacntttaatttctgggattccttt

SEQ ID NO: 124 - DNA, 485 bp, Human
ttcagatttgacatgtcaatctttatttaagacaacaaaagtttgtacactctcatattaagatatatttcctttctagtcatattaaaataatctcattttgttactcaaaaagaatacatagggaagagaatgaacataattcaagtagatagatttctaattggttaaaacagggttaaacaaatgatgttcaaaatatacttattaaagggaacagcacctagaaataggcagtagggcaatgttcactttaagaattttatcaataactagggcaaagaacaaaatcattatcaaattttgaattacacaaaagcaatggcctattaccttgttaacatttgatatttctatatatcttcttctctagttgaaatgggtaatgacttgtattacaaggatgttacacattctaaaatgatttaagccaaaagattatctttaatacattacttctagatataatatgtacttgatgtctg

SEQ ID NO: 125 - DNA, 558 bp, Human
ttttcagacatgacagcatttgacacactcccttttaatttattgcagaaataatatgaacatctgggaaaatgatagtgctaaatatctcgtgaagtaagtcattcttagaaagggatttgtgactttgaagtaatatataattagcaagattttaaaaattattcttatgtactgaaactcaaaacagactagcaaagtacctccaaaaaaaaaactatcaaattaaactagaaaagtatttccaaaataaagacgaccaaaaactagcctgagaatactagttttctgttgctacaacacattaccacaaacttagtggcttaaacacaaatctattatcttacagttctgcagattagaggtccaacacaggcttcactgggctaaaatcaaggtgttggcagggctgcgttccttctgggaggctatggggaagtttctgtttcctttccagtctcaattctaccggctgcctgcaactccctggcttatggccccttcctccatcttcaaagccaggaatggtgcatccctctctaagcgttctccctattt

SEQ ID NO: 126 - protein, 508 aa, Human
MQRLLTPVKRILQLTRAVQETSLTPARLLPVAHQRFSTASAVPLAKTDTWPKDVGILALEVYFPAQYVDQTDLEKYNNVEAGKYTVGLGQTRMGFCSVQEDINSLCLTVVQRLMERIQLPWDSVGRLEVGTETIIDKSKAVKTVLMELFQDSGNTDIEGIDTTNACYGGTASLFNAANWMESSSWDGRYAMVVCGDIAVYPSGNARPTGGAGAVAMLIGPKAPLALERGLRGTHMENVYDFYKPNLASEYPIVDGKLSIQCYLRALDRCYTSYRKKIQNQWKQAGSDRPFTLDDLQYMIFHTPFCKMVQKSLARLMFNDFLSASSDTQTSLYKGLEAFGGLKLEDTYTNKDLDKALLKASQDMFDKKTKASLYLSTHNGNMYTSSLYGCLASLLSHHSAQELAGSRIGAFSYGSGLAASFFSFRVSQDAAPGSPLDKLVSSTSDLPKRLASRKCVSPEEFTEIMNQREQFYHKVNFSPPGDTNSLFPGTWYLERVDEQHRRKYARRPV

SEQ ID NO: 127 - protein, 396 aa, Human
MVAGTRCLLALLLPQVLLGGAAGLVPELGRRKFAAASSGRPSSQPSDEVLSEFELRLLSMFGLKQRPTPSRDAVVPPYMLDLYRRHSGQPGSPAPDHRLERAASRANTVRSFHHEESLEELPETSGKTTRRFFFNLSSIPTEEFITSAELQVFREQMQDALGNNSSFHHRINIYEIIKPATANSKFPVTRLLDTRLVNQNASRWESFDVTPAVMRWTAQGHANHGFVVEVAHLEEKQGVSKRHVRISRSLHQDEHSWSQIRPLLVTFGHDGKGHPLHKREKRQAKHKQRKRLKSSCKRHPLYVDFSDVGWNDWIVAPPGYHAFYCHGECPFPLADHLNSTNHAIVQTLVNSVNSKIPKACCVPTELSAISMLYLDENEKVVLKNYQDMVVEGCGCR

SEQ ID NO: 128 - protein, 219 aa, Human
MADKAKPAKAANRTPPKSPGDPSKDRAAKRLSLESEGAGEGAAASPELSALEEAFRRFAVHGDARATGREMHGKNWSKLCKDCQVIDGRNVTVTDVDIVFSKIKGKSCRTITFEQFQEALEELAKKRFKDKSSEEAVREVHRLIEGKAPIISGVTKAISSPTVSRLTDTTKFTGSHKERFDPSGKGKGKAGRVDLVDESGYVSGYKHAGTYDQKVQGGK

SEQ ID NO: 129 - protein, 384 aa, Human
MDCSNGSAECTGEGGSKEVVGTFKAKDLIVTPATILKEKPDPNNLVFGTVFTDHMLTVEWSSEFGWEKPHIKPLQNLSLHPGSSALHYAVELFEGLKAFRGVDNKIRLFQPNLNMDRMYRSAVRATLPVFDKEELLECIQQLVKLDQEWVPYSTSASLYIRPAFIGTEPSLGVKKPTKALLFVLLSPVGPYFSSGTFNPVSLWANPKYVRAWKGGTGDCKMGGNYGSSLFAQCEDVDNGCQQVLWLYGRDHQITEVGTMNLFLYWINEDGEEELATPPLDGIILPGVTRRCILDLAHQWGEFKVSERYLTMDDLTTALEGNRVREMFSSGTACVVCPVSDILYKGETIHIPTMENGPKLASRILSKLTDIQYGREESDWTIVLS

SEQ ID NO: 130 - protein, 158 aa, Human
MSHGKGTDMLPEIAAAVGFLSSLLRTRGCVSEQRLKVFSGALQEALTEHYKHHWFPEKPSKGSGYRCIRINHKMDPIISRVASQIGLSQPQLHQLLPSELTLWVDPYEVSYRIGEDGSICVLYEEAPLAASCGLLTCKNQVLLGRSSPSKNYVMAVSS

SEQ ID NO: 131 - protein, 344 aa, Human
MGPPSAPPCRLHVPWKEVLLTASLLTFWNPPTTAKLTIESTPFNVAEGKEVLLLAHNLPQNRIGYSWYKGERVDGNSLIVGYVIGTQQATPGPAYSGRETIYPNASLLIQNVTQNDTGFYTLQVIKSDLVNEEATGQFHVYPELPKPSISSNNSNPVEDKDAVAFTCEPEVQNTTYLWWVNGQSLPVSPRLQLSNGNMTLTLLSVKRNDAGSYECEIQNPASANRSDPVTLNVLYGPDVPTISPSKANYRPGENLNLSCHAASNPPAQYSWFINGTFQQSTQELFIPNITVNNSGSYMCQAHNSATGLNRTTVTMITVSGSAPVLSAVATVGITIGVLARVALI

SEQ ID NO: 132 - protein, 479 aa, Human
MKSQGQHWYSSSDKNCKVSFREKLLIIDSNLGVQDVENLKFLCIGLVPNKKLEKSSSASDVFEHLLAEDLLSEEDPFFLAELLYIIRQKKLLQHLNCTKEEVERLLPTRQRVSLFRNLLYELSEGIDSENLKDMIFLLKDSLPKTEMTSLSFLAFLEKQGKIDEDNLTCLEDLCKTVVPKLLRNIEKYKREKAIQIVTPPVDKEAESYQGEEELVSQTDVKTFLEALPRAAVYRMNRNHRGLCVIVNNHSFTSLKDRQGTHKDAEILSHVFQWLGFTVHIHNNVTKVEMEMVLQKQKCNPAHADGDCFVFCILTHGRFGAVYSSDEALIPIREIMSHFTALQCPRLAEKPKLFFIQACQGEEIQPSVSIEADALNPEQAPTSLQDSIPAEADFLLGLATVPGYVSFRHVEEGSWYIQSLCNHLKKLVPRHEDILSILTAVNDDVSRRVDKQGTKKQMPQPAFTLRKKLVFPVPLDALSI

SEQ ID NO: 133 - protein, 509 aa, Human
MTVEGRLLVPDRINGTANKMNGALDHSDQPDPDAIKMFVGQIPRSWSEKELKELFEPYGAVYQINVLRDRSQNPPQSKGCCFVTFYTRKAALEAQNALHNIKTLPGMHHPIQMKPADSEKSNAVEDRKLFIGMVSKKCNENDIRVMFSPFGQIEECRILRGPDGLSRGCAFVTFSTRAMAQNAIKAMHQSQTMEGCSSPIVVKFADTQKDKEQRRLQQQLAQQMQQLNTATWGNLTGLGGLTPQYLALLQQATSSSNLGAFSGIQQMAGMNALQLQNLATLAAAAAAAQTSATSTNANPLSTTSSALGALTSPVAASTPNSTAGAAMNSLTSLGTLQGLAGATVGLNNINALAVAQMLSGMAALNGGLGATGLTNGTAGTMDALTQAYSGIQQYAAAALPTLYSQSLLQQQSAAGSQKEGPEGANLFIYHLPQEFGDQHILQMFMPFGNVISAKVFIDKQTNLSKCFGFVSYDNPVSAQAAIQAMNGFQIGMKRLKVQLKRSKNDSKPY

SEQ ID NO: 134 - protein, 141 aa, Human
MARPLCTLLLLMATLAGALASSSKEENRIIPGGIYDADLNDEWVQRALHFAISEYNKATEDEYYRRPLQVLRAREQTFGGVNYFFDVEVGRTICTKSQPNLDTCAFHEQPELQKKQLCSFEIYEVPWEDRMSLVNSRCQEA

SEQ ID NO: 135 - protein, 1480 aa, Human
MQRSPLEKASVVSKLFFSWTRPILRKGYRQRLELSDIYQIPSVDSADNLSEKLEREWDRELASKKNPKLINALRRCFFWRFMFYGIFLYLGEVTKAVQPLLLGRIIASYDPDNKEERSIAIYLGIGLCLLFIVRTLLLHPAIFGLHHIGMQMRIAMFSLIYKKTLKLSSRVLDKISIGQLVSLLSNNLNKFDEGLALAHFVWIAPLQVALLMGLIWELLQASAFCGLGFLIVLALFQAGLGRMMMKYRDQRAGKISERLVITSEMIENIQSVKAYCWEEAMEKMIENLRQTELKLTRKAAYVRYFNSSAFFFSGFFVVFLSVLPYALIKGIILRKIFTTISFCIVLRMAVTRQFPWAVQTWYDSLGAINKIQDFLQKQEYKTLEYNLTTTEVVMENVTAFWEEGFGELFEKAKQNNNNRKTSNGDDSLFFSNFSLLGTPVLKDINFKIERGQLLAVAGSTGAGKTSLLMMIMGELEPSEGKIKHSGRISFCSQFSWIMPGTIKENIIFGVSYDEYRYRSVIKACQLEEDISKFAEKDNIVLGEGGITLSGGQRARISLARAVYKDADLYLLDSPFGYLDVLTEKEIFESCVCKLMANKTRILVTSKMEHLKKADKILILNEGSSYFYGTFSELQNLQPDFSSKLMGCDSFDQFSAERRNSILTETLHRFSLEGDAPVSWTETKKQSFKQTGEFGEKRKNSILNPINSIRKFSIVQKTPLQMNGIEEDSDEPLERRLSLVPDSEQGEAILPRISVISTGPTLQARRRQSVLNLMTHSVNQGQNIHRKTTASTRKVSLAPQANLTELDIYSRRLSQETGLEISEEINEEDLKECLFDDMESIPAVTTWNTYLRYITVHKSLIFVLIWCLVIFLAEVAASLVVLWLLGNTPLQDKGNSTHSRNNSYAVIITSTSSYYVFYIYVGVADTLLAMGFFRGLPLVHTLITVSKILHHKMLHSVLQAPMSTLNTLKAGGILNRFSKDIAILDDLLPLTIFDFIQLLLIVIGAIAVVAVLQPYIFVATVPVIVAFIMLRAYFLQTSQQLKQLESEGRSPIFTHLVTSLKGLWTLRAFGRQPYFETLFHKALNLHTANWFLYLSTLRWFQMRIEMIFVIFFIAVTFISILTTGEGEGRVGIILTLAMNIMSTLQWAVNSSIDVDSLMRSVSRVFKFIDMPTEGKPTKSTKPYKNGQLSKVMIIENSHVKKDDIWPSGGQMTVKDLTAKYTEGGNAILENISFSISPGQRVGLLGRTGSGKSTLLSAFLRLLNTEGEIQIDGVSWDSITLQQWRKAFGVIPQKVFIFSGTFRKNLDPYEQWSDQEIWKVADEVGLRSVIEQFPGKLDFVLVDGGCVLSHGHKQLMCLARSVLSKAKILLLDEPSAHLDPVTYQIIRRTLKQAFADCTVILCEHRIEAMLECQQFLVIEENKVRQYDSIQKLLNERSLFRQAISPSDRVKLFPHRNSSKCKSKPQIAALKEETEEEVQDTRL

SEQ ID NO: 136 - protein, 502 aa, Human
MLAAMGSLAAALWAVVHPRTLLLGTVAFLLAADFLKRRRPKNYPPGPWRLPFLGNFFLVDFEQSHLEVQLFVKKYGNLFSLELGDISAVLITGLPLIKEALIHMDQNFGNRPVTPMREHIFKKNGLIMSSGQAWKEQRRFTLTALRNFGLGKKSLEERIQEEAQHLTEAIKEENGQPFDPHFKINNAVSNIICSITFGERFEYQDSWFQQLLKLLDEVTYLEASKTCQLYNVFPWIMKFLPGPHQTLFSNWKKLKLFVSHMIDKHRKDWNPAETRDFIDAYLKEMSKHTGNPTSSFHEENLICSTLDLFFAGTETTSTTLRWALLYMALYPEIQEKVQAEIDRVIGQGQQPSTAARESMPYTNAVIHEVQRMGNIIPLNVPREVTVDTTLAGYHLPKGTMILTNLTALHRDPTEWATPDTFNPDHFLENGQFKKREAFMPFSIGKRACLGEQLARTELFIFFTSLMQKFTFRPPNNEKLSLKFRMGITISPVSHRLCAVPQV

SEQ ID NO: 137 - protein, 766 aa, Human [sequence omitted]

SEQ ID NO: 138 - protein, 984 aa, Human
MERRWPLGLGLVLLLCAPLPPGARAKEVTLMDTSKAQGELGWLLDPPKDGWSEQQQILNGTPLYMYQDCPMQGRRDTDHWLRSNWIYRGEEASRVHVELQFTVRDCKSFPGGAGPLGCKETFNLLYMESDQDVGIQLRRPLFQKVTTVAADQSFTIRDLASGSVKLNVERCSLGRLTRRGLYLAFHNPGACVALVSVRVFYQRCPETLNGLAQFPDTLPGPAGLVEVAGTCLPHARASPRPSGAPRMHCSPDGEWLVPVGRCHCEPGYEEGGSGEACVACPSGSYRMDMDTPHCLTCPQQSTAESEGATICTCESGHYRAPGEGPQVACTGPPSAPRNLSFSASGTQLSLRWEPPADTGGRQDVRYSVRCSQCQGTAQDGGPCQPCGVGVHFSPGARALTTPAVHVNGLEPYANYTFNVEAQNGVSGLGSSGHASTSVSISMGHAESLSGLSLRLVKKEPRQLELTWAGSRPRSPGANLTYELHVLNQDEERYQMVLEPRVLLTELQPDTTYIVRVRMLTPLGPGPFSPDHEFRTSPPVSRGLTGGEIVAVIFGLLLGAALLLGILVFRSRRAQRQRQQRHVTAPPMWIERTSCAEALCGTSRHTRTLHREPWTLPGGWSNFPSRELDPAWLMVDTVIGEGEFGEVYRGTLRLPSQDCKTVAIKTLKDTSPGGQWWNFLREATIMGQFSHPHILHLEGVVTKRKPIMIITEFMENAALDAFLREREDQLVPGQLVAMLQGIASGMNYLSNHNYVHRDLAARNILVNQNLCCKVSDFGLTRLLDDFDGTYETQGGKIPIRWTAPEAIAHRIFTTASDVWSFGIVMWEVLSFGDKPYGEMSNQEVMKSIEDGYRLPPPVDCPAPLYELMKNCWAYDRARRPHFQKLQAHLEQLLANPHSLRTIANFDPRVTLRLPSLSGSDGIPYRTVSEWLESIRMKRYILHFHSAGLDTMECVLELTAEDLTQMGITLPGHQKRILCSIQGFKD

SEQ ID NO: 139 - protein, 822 aa, Human
MVSWGRFICLVVVTMATLSLARPSFSLVEDTTLEPEEPPTKYQISQPEVYVAAPGESLEVRCLLKDAAVISWTKDGVHLGPNNRTVLIGEYLQIKGATPRDSGLYACTASRTVDSETWYFMVNVTDAISSGDDEDDTDGAEDFVSENSNNKRAPYWTNTEKMEKRLHAVPAANTVKFRCPAGGNPMPTMRWLKNGKEFKQEHRIGGYKVRNQHWSLIMESVVPSDKGNYTCVVENEYGSINHTYHLDVVERSPHRPILQAGLPANASTVVGGDVEFVCKVYSDAQPHIQWIKHVEKNGSKYGPDGLPYLKVLKHSGINSSNAEVLALFNVTEADAGEYICKVSNYIGQANQSAWLTVLPKQQAPGREKEITASPDYLEIAIYCIGVFLIACMVVTVILCRMKNTTKKPDFSSQPAVHKLTKRIPLRRQVTVSAESSSSMNSNTPLVRITTRLSSTADTPMLAGVSEYELPEDPKWEFPRDKLTLGKPLGEGCFGQVVMAEAVGIDKDKPKEAVTVAVKMLKDDATEKDLSDLVSEMEMMKMIGKHKNIINLLGACTQDGPLYVIVEYASKGNLREYLRARRPPGMEYSYDINRVPEEQMTFKDLVSCTYQLARGMEYLASQKCIHRDLAARNVLVTENNVMKIADFGLARDINNIDYYKKTTNGRLPVKWMAPEALFDRVYTHQSDVWSFGVLMWEIFTLGGSPYPGIPVEELFKLLKEGHRMDKPANCTNELYMMMRDCWHAVPSQRPTFKQLVEDLDRILTLTTNEEYLDLSQPLEQYSPSYPDTRSSCSSGDDSVFSPDPMPYEPCLPQYPHINGSVKT

SEQ ID NO: 140 - protein, 87 aa, Human
MQKVTLGLLVFLAGFPVLDANDLEDKNSPFYYDWHSLQVGGLICAGVLCAMGIIIVMSAKCKCKFGQKSGHHPGETPPLITPGSAQS

SEQ ID NO: 141 - protein, 907 aa, Human
MDTSRLGVLLSLPVLLQLATGGSSPRSGVLLRGCPTHCHCEPDGRMLLRVDCSDLGLSELPSNLSVFTSYLDLSMNNISQLLPNPLPSLRFLEELRLAGNALTYIPKGAFTGLYSLKVLMLQNNQLRHVPTEALQNLRSLQSLRLDANHISYVPPSCFSGLHSLRHLWLDDNALTEIPVQAFRSLSALQAMTLALNKIHHIPDYAFGNLSSLVVLHLHNNRIHSLGKKCFDGLHSLETLDLNYNNLDEFPTAIRTLSNLKELGFHSNNIRSIPEKAFVGNPSLITIHFYDNPIQFVGRSAFQHLPELRTLTLNGASQITEFPDLTGTANLESLTLTGAQISSLPQTVCNQLPNLQVLDLSYNLLEDLPSFSVCQKLQKIDLRHNEIYEIKVDTFQQLLSLRSLNLAWNKIAIIHPNAFSTLPSLIKLDLSSNLLSSFPITGLHGLTHLKLTGNHALQSLISSENFPELKVIEMPYAYQCCAFGVCENAYKISNQWNKGDNSSMDDLHKKDAGMFQAQDERDLEDFLLDFEEDLKALHSVQCSPSPGPFKPCEHLLDGWLIRIGVWTIAVLALTCNALVTSTVFRSPLYISPIKLLIGVIAAVNMLTGVSSAVLAGVDAFTFGSFARHGAWWENGVGCHVIGFLSIFASESSVFLLTLAALERGFSVKYSAKFETKAPFSSLKVIILLCALLALTMAAVPLLGGSKYGASPLCLPLPFGEPSTMGYMVALILLNSLCFLMMTIAYTKLYCNLDKGDLENIWDCSMVKHIALLLFTNCILNCPVAFLSFSSLINLTFISPEVIKFILLVVVPLPACLNPLLYILFNPHFKEDLVSLRKQTYVWTRSKHPSLMSINSDDVEKQSCDSTQALVTFTSSSITYDLPPSSVPSPAYPVTESCHLSSVAFVPCL

SEQ ID NO: 142 - protein, 1134 aa, Human
MESTPSFLKGTPTWEKTAPENGIVRQEPGSPPRDGLHHGPLCLGEPAPFWRGVLSTPDSWLPPGFPQGPKDMLPLVEGEGPQNGERKVNWLGSKEGLRWKEAMLTHPLAFCGPACPPRCGPLMPEHSGGHLKSDPVAFRPWHCPFLLETKILERAPFWVPTCLPPYLVSGLPPEHPCDWPLTPHPWVYSGGQPKVPSAFSLGSKGFYYKDPSIPRLAKEPLAAAEPGLFGLNSGGHLQRAGEAERPSLHQRDGEMGAGRQQNPCPLFLGQPDTVPWTSWPACPPGLVHTLGNVWAGPGDGNLGYQLGPPATPRCPSPEPPVTQRGCCSSYPPTKGGGLGPCGKCQEGLEGGASGASEPSEEVNKASGPRACPPSHHTKLKKTWLTRHSEQFECPRGCPEVEERPVARLRALKRAGSPEVQGAMGSPAPKRPPDPFPGTAEQGAGGWQEVRDTSIGNKDVDSGQHDEQKGPQDGQASLQDPGLQDIPCLALPAKLAQCQSCAQAAGEGGGHACHSQQVRRSPLGGELQQEEDTATNSSSEEGPGSGPDSRLSTGLAKHLLSGLGDRLCRLLRREREALAWAQREGQGPAVTEDSPGIPRCCSRCHHGLFNTHWRCPRCSHRLCVACGRVAGTGRAREKAGFQEQSAEECTQEAGHAACSLMLTQFVSSQALAELSTAMHQVWVKFDIRGHCPCQADARVWAPGDAGQQKESTQKTPPTPQPSCNGDTHRTKSIKEETPDSAETPAEDRAGRGPLPCPSLCELLASTAVKLCLGHERIHMAFAPVTPALPSDDRITNILDSIIAQVVERKIQEKALGPGLRAGPGLRKGLGLPLSPVRPRLPPPGALLWLQEPQPCPRRGFHLFQEHWRQGQPVLVSGIQRTLQGNLWGTEALGALGGQVQALSPLGPPQPSSLGSTTFWEGFSWPELRPKSDEGSVLLLHRALGDEDTSRVENLAASLPLPEYCALHGKLNLASYLPPGLALRPLEPQLWAAYGVSPHRGHLGTKNLCVEVADLVSILVHADTPLPAWHRAQKDFLSGLDGEGLWSPGSQVSTVWHVFRAQDAQRIRRFLQMVQGLVSTVSVTQHFLSPETSALSAQLCHQGPSLPPDCHLLYAQMDWAVFQAVKVAVGTLQEAK

SEQ ID NO: 143 - protein, 142 aa, Human
MVLSPADKTNVKAAWGKVGAHAGEYGAEALERMFLSFPTTKTYFPHFDLSHGSAQVKGHGKKVADALTNAVAHVDDMPNALSALSDLHAHKLRVDPVNFKLLSHCLLVTLAAHLPAEFTPAVHASLDKFLASVSTVLTSKYR

SEQ ID NO: 144 - protein, 543 aa, Human
MLLRSKPALPPPLMLLLLGPLGPLSPGALPRPAQAQDVVDLDFFTQEPLHLVSPSFLSVTIDANLATDPRFLILLGSPKLRTLARGLSPAYLRFGGTKTDFLIFDPKKESTFEERSYWQSQVNQDICKYGSIPPDVEEKLRLEWPYQEQLLLREHYQKKFKNSTYSRSSVDVLYTFANCSGLDLIFGLNALLRTADLQWNSSNAQLLLDYCSSKGYNISWELGNEPNSFLKKADIFINGSQLGEDFIQLHKLLRKSTFKNAKLYGPDVGQPRRKTAKMLKSFLKAGGEVIDSVTWHHYYLNGRTATREDFLNPDVLDIFISSVQKVFQVVESTRPGKKVWLGETSSAYGGGAPLLSDTFAAGFMWLDKLGLSARMGIEVVMRQVFFGAGNYHLVDENFDPLPDYWLSLLFKKLVGTKVLMASVQGSKRRKLRVYLHCTNTDNPRYKEGDLTLYAINLHNVTKYLRLPYPFSNKQVDKYLLRPLGPHGLLSKSVQLNGLTLKMVDDQTLPPLMEKPLRPGSSLGLPAFSYSFFVIRNAKVAACI

SEQ ID NO: 145 - protein, 203 aa, Human
CSVPFLPLAVPVRAVHRLLEHRHHSVTWPATELPITQLTSSIVRRVNEASGLYQMFGVLADVILLKETGGEVPPCTLAPASAHGHPSHRGRLLNRLDCPDRAHPTSEALPGELFGHRFAKLLCRVLLPVRPHAPEVATLLPAGVPEDAGTREYREPLAAQSGEQAPAGLCPHRQAPGGQQPAAWRPRATRFPPGSRASGSVRR

SEQ ID NO: 146 - protein, 414 aa, Human
MKAQTALSFFLILITSLSGSQGIFPLAFFIYVPMNEQIVIGRLDEDIILPSSFERGSEVVIHWKYQDSYKVHSYYKGSDHLESQDPRYANRTSLFYNEIQNGNASLFFRRVSLLDEGIYTCYVGTAIQVITNKVVLKVGVFLTPVMKYEKRNTNSFLICSVLSVYPRPIITWKMDNTPISENNMEETGSLDSFSINSPLNITGSNSSYECTIENSLLKQTWTGRWTMKDGLHKMQSEHVSLSCQPVNDYFSPNQDFKVTWSRMKSGTFSVLAYYLSSSQNTIINESRFSWNKELINQSDFSMNLMDLNLSDSGEYLCNISSDEYTLLTIHTVHVEPSQETASHNKGLWILVPSAILAAFLLIWSVKCCRAQLEARRSRHPADGAQQERCCVPPGERCPSAPDNGEENVPLSGKV

SEQ ID NO: 147 - protein, 545 aa, Human
MVDAAENLCPNVMKKAHIRQDLIHASTEKISIPRTFVKNVLLEQSGIDILNKISEVKLTVASFLSDRIVDEILDALSHCHHKLADHFSRRGKTLPQQESLEIELAEERPVKRSIITVEELTEIERLEDLDTCMMTPKSKRKSIHSRMLRPVSRAFEMEFDLDKALEEVPIHIEDPPFPSLRQEKRSSGFISELPSEEGKKLEHFTKLRPKRNKKQQPTQAAVCAANIVSQDGEQNGLMGRVDEGVDEFFTKKVTKMDSKKWSTRGSESHELNEGGDEKKKRDSRKSSGFLNLIKSRSKSERPPTILMTEEPSSPKGAVRSPPVDCPRKDTKAAEHNGNSERIEEIKTPDSFEESQGEEIGKVERSDSKSSPQAGRRYGVQVMGSGLLAEMKAKQENRFGLGTPEKNTKAEPKAEAGSRSRSSSSTPTSPKPLLQSPKPSLAARPVIPQKPRTASRPDDIPDSPSSPKVALLPPVLKKVPSDKERDGQSSPQPSPRTFSQEVSRRSWGQQAQEYQEQKQRSSSKDGHQGSKSNDSGEEAEKEFIFV

SEQ ID NO: 148 - protein, 315 aa, Human
MPLKLRGKKKAKSKETAGLVEGEPTGAGGGSLSASRAPARRLVFHAQLAHGSATGRVEGFSSIQELYAQIAGAFEISPSEILYCTLNTPKIDMERLLGGQLGLEDFIFAHVKGIEKEVNVYKSEDSLGLTITDNGVGYAFIKRIKDGGVIDSVKTICVGDHIESINGENIVGWRHYDVAKKLKELKKEELFTMKLIEPKKAFEIELRSKAGKSSGEKIGCGRATLRLRSKGPATVEEMPSETKAKAIEKIDDVLELYMGIRDIDLATTMFEAGKDKVNPDEFAVALDETLGDFAFPDEFVFDVWGVIGDAKRRGL

SEQ ID NO: 149 - protein, 486 aa, Human
MPRPAPARRLPGLLLLLWPLLLLPSAAPDPVARPGFRRLETRGPGGSPGRRPSPAAPDGAPASGTSEPGRARGAGVCKSRPLDLVFIIDSSRSVRPLEFTKVKTFVSRIIDTLDIGPADTRVAVVNYASTVKIEFQLQAYTDKQSLKQAVGRITPLSTGTMSGLAIQTAMDEAFTVEAGAREPSSNIPKVAIIVTDGRPQDQVNEVAARAQASGIELYAVGVDRADMASLKMMASEPLEEHVFYVETYGVIEKLSSRFQETFCALDPCVLGTHQCQHVCISDGEGKHHCECSQGYTLNADKKTCSALDRCALNTHGCEHICVNDRSGSYHCECYEGYTLNEDRKTCSAQDKCALGTHGCQHICVNDRTGSHHCECYEGYTLNADKKTCSVRDKCALGSHGCQHICVSDGAASYHCDCYPGYTLNEDKKTCSATEEARRLVSTEDACGCEATLAFQDKVSSYLQRLNTKLDDILEKLKINEYGQIHR

SEQ ID NO: 150 - protein, 668 aa, Human
MAANMYRVGDYVYFENSSSNPYLVRRIEELNKTANGNVEAKVVCLFRRRDISSSLNSLADSNAREFEEESKQPGVSEQQRHQLKHRELFLSRQFESLPATHIRGKCSVTLLNETDILSQYLEKEDCFFYSLVFDPVQKTLLADQGEIRVGCKYQAEIPDRLVEGESDNRNQQKMEMKVWDPDNPLTDRQIDQFLVVARAVGTFARALDCSSSIRQPSLHMSAAAASRDITLFHAMDTLQRNGYDLAKAMSTLVPQGGPVLCRDEMEEWSASEAMLFEEALEKYGKDFNDIRQDFLPWKSLASIVQFYYMWKTTDRYIQQKRLKAAEADSKLKQVYIPTYTKPNPNQIISVGSKPGMNGAGFQKGLTCESCHTTQSAQWYAWGPPNMQCRLCASCWIYWKKYGGLKTPTQLEGATRGTTEPHSRGHLSRPEAQSLSPYTTSANRAKLLAKNRQTFLLQTTKLTRLARRMCRDLLQPRRAARRPYAPINANAIKAECSIRLPKAAKTPLKIHPLVRLPLATIVKDLVAQAPLKPKTPRGTKTPINRNQLSQNRGLGGIMVKRAYETMAGAGVPFSANGRPLASGIRSSSQPAAKRQKLNPADAPNPVVFVATKDTRALRKALTHLEMRRAARRPNLPLKVKPTLIAVRPPVPLPAPSHPASTNEPIVLED

SEQ ID NO: 151 - protein, 5179 aa, Human
MGLPLARLAAVCLALSLAGGSELQTEGRTRYHGRNVCSTWGNFHYKTFDGDVFRFPGLCDYNFASDCRGSYKEFAVHLKRGPGQAEAPAGVESILLTIKDDTIYLTRHLAVLNGAVVSTPHYSPGLLIEKSDAYTKVYSRAGLTLMWNREDALMLELDTKFRNHTCGLCGDYNGLQSYSEFLSDGVLFSPLEFGNMQKINQPDVVCEDPEEEVAPASCSEHRAECERLLTAEAFADCQDLVPLEPYLRACQQDRCRCPGGDTCVCSTVAEFSRQCSHAGGRPGNWRTATLCPKTCPGNLVYLESGSPCMDTCSHLEVSSLCEEHRMDGCFCPEGTVYDDIGDSGCVPVSQCHCRLHGHLYTPGQEITNDCEQCVCNAGRWVCKDLPCPGTCALEGGSHITTFDGKTYTFHGDCYYVLAKGDHNDSYALLGELAPCGSTDKQTCLKTVVLLADKKKNAVVFKSDGSVLLNQLQVNLPHVTASFSVFRPSSYHIMVSMAIGVRLQVQLAPVMQLFVTLDQASQGQVQGLCGNFNGLEGDDFKTASGLVEATGAGFANTWKAQSTCHDKLDWLDDPCSLNIESANYAEHWCSLLKKTETPFGRCHSAVDPAEYYKRCKYDTCNCQNNEDCLCAALSSYARACTAKGVMLWGWREHVCNKDVGSCPNSQVFLYNLTTCQQTCRSLSEADSHCLEGFAPVDGCGCPDHTFLDEKGRCVPLAKCSCYHRGLYLEAGDVVVRQEERCVCRDGRLHCRQIRLIGQSCTAPKIHMDCSNLTALATSKPRALSCQTLAAGYYHTECVSGCVCPDGLMDDGRGGCVVEKECPCVHNNDLYSSGAKIKVDCNTCTCKRGRWVCTQAVCHGTCSIYGSGHYITFDGKYYDFDGHCSYVAVQDYCGQNSSLGSFSIITENVPCGTTGVTCSKAIKIFMGRTELKLEDKHRVVIQRDEGHHVAYTTREVGQYLVVESSTGIIVIWDKRTTVFIKLAPSYKGTVCGLCGNFDHRSNNDFTTRDHMVVSSELDFGNSWKEAPTCPDVSTNPEPCSLNPHRRSWAEKQCSILKSSVFSICHSKVDPKPFYEACVHDSCSCDTGGDCECFCSAVASYAQECTKEGACVFWRTPDLCPIFCDYYNPPHECEWHYEPCGNRSFETCRTINGIHSNISVSYLEGCYPRCPKDRPIYEEDLKKCVTADKCGCYVEDTHYPPGASVPTEETCKSCVCTNSSQVVCRPEEGKILNQTQDGAFCYWEICGPNGTVEKHFNICSITTRPSTLTTFTTITLPTTPTSFTTTTTTTTPTSSTVLSTTPKLCCLWSDWINEDHPSSGSDDGDREPFDGVCGAPEDIECRSVKDPHLSLEQHGQKVQCDVSVGFICKNEDQFGNGPFGLCYDYKIRVNCCWPMDKCITTPSPPTTTPSPPPTTTTTLPPTTTPSPPTTTTTTPPPTTTPSPPITTTTTPLPTTTPSPPISTTTTPPPTTTPSPPTTTPSPPTTTPSPPTTTTTTPPPTTTPSPPMTTPITPPASTTTLPPTTTPSPPTTTTTTPPPTTTPSPPTTTPITPPTSTTTLPPTTTPSPPPTTTTTPPPTTTPSPPTTTTPSPPTITTTTPPPTTTPSPPTTTTTTPPPTTTPSPPTTTPITPPTSTTTLPPTTTPSPPPTTTTTPPPTTTPSPPTTTTPSPPITTTTTPPPTTTPSSPITTTPSPPTTTMTTPSPTTTPSSPITTTTTPSSTTTPSPPPTTMTTPSPTTTPSPPTTTMTTLPPTTTSSPLTTTPLPPSITPPTFSPFSTTTPTTPCVPLCNWTGWLDSGKPNFHKPGGDTELIGDVCGPGWAANISCRATMYPDVPIGQLGQTVVCDVSVGLICKNEDQKPGGVIPMAFCLNYEINVQCCECVTQPTTMTTTTTENPTPPTTTPITTTTTVTPTPTPTGTQTPTTTPITTTTTVTPTPTPTGTQTPTTTPITTTTTVTPTPTPTGTQTPTTTPITTTTTVTPTPTPTGTQTPTTTPITTTTTVTPTPTPTGTQTPTTTPITTTTTVTPTPTPTGTQTPTTTPITTTTTVTPTPTPTGTQTPTTTPITTTTTVTPTPTPTGTQTPTTTPITTTTTVTPTPTPTGTQTPTTTPITTTTTVTPTPTPTGTQTPTTTPITTTTTVTPTPTPTGTQTPTTTPITTTTTVTPTPTPTGTQTPTTTPITTTTTVTPTPTPTGTQTPTTTPITTTTTVTPTPTPTGTQTPTTTPITTTTTVTPTPTPTGTQTPTTTPITTTTTVTPTPTPTGTQTPTTTPITTTTTVTPTPTPTGTQTPTTTPITTTTTVTPTPTPTGTQTPTTTPITTTTTVTPTPTPTGTQTPTTTPITTTTTVTPTPTPTGTQTPTTTPITTTTTVTPTPTPTGTQTPTTTPITTTTTVTPTPTPTGTQTPTTTPITTTTTVTPTPTPTGTQTPTTTPITTTTTVTPTPTPTGTQTPTTTPITTTTTVTPTPTPTGTQTPTTTPITTTTTVTPTPTPTGTQTPTTTPITTTTTVTPTPTPTGTQTPTTTPITTTTTVTPTPTPTGTQTPTTTPITTTTTVTPTPTPTGTQTPTTTPITTTTTVTPTPTPTGTQTPTTTPITTTTTVTPTPTPTGTQTPTTTPITTTTTVTPTPTPTGTQTPTTTPITTTTTVTPTPTPTGTQTPTTTPITTTTTVTPTPTPTGTQTPTTTPITTTTTVTPTPTPTGTQTPTTTPITTTTTVTPTPTPTGTQTPTTTPITTTTTVTPTPTPTGTQTPTTTPITTTTTVTPTPTPTGTQTPTTTPITTTTTVTPTPTPTGTQTPTTTPITTTTTVTPTPTPTGTQTPTTTPITTTTTVTPTPTPTGTQTPTTTPITTTTTVTPTPTPTGTQTPTTTPITTTTTVTPTPTPTGTQTPTTTPITTTTTVTPTPTPTGTQTPTTTPITTTTTVTPTPTPTGTQTPTTTPITTTTTVTPTPTPTGTQTPTTTPITTTTTVTPTPTPTGTQTPTTTPITTTTTVTPTPTPTGTQTPTTTPITTTTTVTPTPTPTGTQTPTTTPITTTTTVTPTPTPTGTQTPTTTPITTTTTVTPTPTPTGTQTPTTTPITTTTTVTPTPTPTGTQTPTTTPITTTTTVTPTPTPTGTQTPTTTPITTTTTVTPTPTPTGTQTPTTTPITTTTTVTPTPTPTGTQTPTTTPITTTTTVTPTPTPTGTQTPTTTPITTTTTVTPTPTPTGTQTPTTTPITTTTTVTPTPTPTGTQTPTTTPITTTTTVTPTPTPTGTQTPTTTPITTTTTVTPTPTPTGTQTPTTTPITTTTTVTPTPTPTGTQTPTTTPITTTTTVTPTPTPTGTQTPTTTPITTTTTVTPTPTPTGTQTPTTTPITTTTTVTPTPTPTGTQTPTTTPITTTTTVTPTPTPTGTQTPTTTPITTTTTVTPTPTPTGTQTPTTTPITTTTTVTPTPTPTGTQTPTTTPITTTTTVTPTPTPTGTQTPTTTPITTTTTVTPTPTPTGTQTPTTTPITTTTTVTPTPTPTGTQTPTTTPITTTTTVTPTPTPTGTQTPTTTPITTTTTVTPTPTPTGTQTPTTTPITTTTTVTPTPTPTGTQTPTTTPITTTTTVTPTPTPTGTQTPTTTPITTTTTVTPTPTPTGTQTPTTTPITTTTTVTPTPTPTGTQTPTTTPITTTTTVTPTPTPTGTQTPTTTPITTTTTVTPTPTPTGTQTPTTTPITTTTTVTPTPTPTGTQTPTTTPITTTTTVTPTPTPTGTQTPTTTPITTTTTVTPTPTPTGTQTPTTTPITTTTTVTPTPTPTGTQTPTTTPITTTTTVTPTPTPTGTQTPTTTPITTTTTVTPTPTPTGTQTPTTTPITTTTTVTPTPTPTGTQTPTTTPITTTTTVTPTPTPTGTQTPTTTPITTTTTVTPTPTPTGTQTPTTTPITTTTTVTPTPTPTGTQTPTTTPITTTTTVTPTPTPTGTQTPTTTPITTTTTVTPTPTPTGTQTPTTTPITTTTTVTPTPTPTGTQTPTTTPITTTTTVTPTPTPTGTQTPTTTPITTTTTVTPTPTPTGTQTPTTTPITTTTTVTPTPTPTGTQTPTTTPITTTTTVTPTPTPTGTQTPTTTPITTTTTVTPTPTPTGTQTPTTTPITTTTTVTPTPTPTGTQTPTTTPITTTTTVTPTPTPTGTQTPTTTPITTTTTVTPTPTPTGTQTPTTTPITTTTTVTPTPTPTGTQTGPPTHTSTAPIAELTTSNPPPESSTPQTSRSTSSPLTESTTLLSTLPPAIEMTSTAPPSTPTAPTTTSGGHTLSPPPSTTTSPPGTPTRGTTTGSSSAPTPSTVQTTTTSAWTPTPTPLSTPSIIRTTGLRPYPSSVLICCVLNDTYYAPGEEVYNGTYGDTCYFVNCSLSCTLEFYNWSCPSTPSPTPTPSKSTPTPSKPSSTPSKPTPGTKPPECPDFDPPRQENETWWLCDCFMATCKYNNTVEIVKVECEPPPMPTCSNGLQPVRVEDPDGCCWHWECDCYCTGWGDPHYVTFDGLYYSYQGNCTYVLVEEISPSVDNFGVYIDNYHCDPNDKVSCPRTLIVRHETQEVLIKTVHMMPMQVQVQVNRQAVALPYKKYGLEVYQSGINYVVDIPELGVLVSYNGLSFSVRLPYHRFGNNTKGQCGTCTNTTSDDCILPSGEIVSNCEAAADQWLVNDPSKPHCPHSSSTTKRPAVTVPGGGKTTPHKDCTPSPLCQLIKDSLFAQCHALVPPQHYYDACVFDSCFMPGSSLECASLQAYAALCAQQNICLDWRNHTHGACLVECPSHREYQACGPAEEPTCKSSSSQQNNTVLVEGCFCPEGTMNYAPGFDVCVKTCGCVGPDNVPREFGEHFEFDCKNCVCLEGGSGIICQPKRCSQKPVTHCVEDGTYLATEVNPADTCCNITVCKCNTSLCKEKPSVCPLGFEVKSKMVPGRCCPFYWCESKGVCVHGNAEYQPGSPVYSSKCQDCVCTDKVDNNTLLNVIACTHVPCNTSCSPGFELMEAPGECCKKCEQTHCIIKRPDNQHVILKPGDFKSDPKNNCTFFSCVKIHNQLISSVSNITCPNFDASICIPGSITFMPNGCCKTCTPRNETRVPCSTVPVTTEVSYAGCTKTVLMNHCSGSCGTFVMYSAKAQALDHSCSCCKEEKTSQREVVLSCPNGGSLTHTYTHIESCQCQDTVCGLPTGTSRRARRSPRHLGSG

SEQ ID NO: 152 - protein, 878 aa, Human
TIYSTVSSSTTAITSPFTTAETGVTSTPSSPSSLSTDIPTTSLRTLTPLSLSTSTSLTTTTDLPSIPTDISSLPTPIHIISSSPSIQSTETSSLVGTTSPTMSTVRATLRSTENTPISSFSTSIVVTPETPTTQAPPVLMSATGTQTSPVPTTVTFGSMDSSTSTLHTLTPSTALSKIMSTSQFPIPSTHSSTLQTTPSIPSLQTSLTSTSEFTTESFTRGSTSTNAILTSFSTIIWSSTPTIIMSSSPSSASITPVFATTIHSVPSSPYIFSTENVGSASITAFPSLSSSSTTSTSPTSSSLTTALTEITPFSYISLPSTTPCPGTITITIVPASPTDPCVEMDPSTEATSPPTTPLTVFPFTTEMVTCPSSISMQTTLATHMDTSSMTPESESSIIPNASSSTGTGTVPTNTVFTSTRLPTSETWLSNNSVIPTPLPGVSTIPLTMKPSSSLPTILRTSSKSTHPSPPTARTSETSVATTQTPTTLTTRRTTPITSWMTTQSTLTTTAGTCDNGGTWEQGQCACLPGFSGDRCQLQTRCQNGGQWDGLKCQCPSTFYGSSCEFAVEQVDLDVVETEVGMEVSVDQQFSPDLNDNTSQAYRDFNKTFWNQMQKIFADMQGFTFKGVEILSLRNGSIVVDYLVLLEMPFSPQLESEYEQVKTTLKEGLQNASQDANSCQDSQTLCFKPDSIKVNNNSKTELTPEAICRRAAPTGYEEFYFPLVEATRLRCVTKCTSGVDNAIDCHQGQCVLETSGPACRCYSTDTHWFSGPRCEVAVHWRALVGGLTAGAALLVLLLLALGVRAVRSGWWGGQRRGRSWDQDRKWFETWDEEVVGTFSNWGFEDDGTDKDTNFHVALENVDTTMKVHIKRPEMTSSSV

SEQ ID NO: 153 - protein, 1938 aa, Human
MSSDAEMAIFGEAAPYLRKPEKERIEAQNRPFDSKKACFVADNKEMYVKGMIQTRENDKVIVKTLDDRMLTLNNDQVFPMNPPKFDKIEDMAMMTHLHEPAVLYNLKERYAAWMIYTYSGLFCVTVNPYKWLPVYKPEVVAAYRGKKRQEAPPHIFSISDNAYQFMLTDRDNQSILITGESGAGKTVNTKRVIQYFATIAVTGDKKKETQPGKMQGTLEDQIIQANPLLEAFGNAKTVRNDNSSRFGKFIRIHFGATGKLASADIETYLLEKSRVTFQLSSERSYHIFYQIMSNKKPELIDLLLISTNPFDFPFVSQGEVTVASIDDSEELLATDNAIDILGFSSEEKVGIYKLTGAVMHYGNMKFKQKQREEQAEPDGTEVADKAGYLMGLNSAEMLKGLCCPRVKVGNEYVTKGQNVQQVTNSVGALAKAVYEKMFLWMVTRINQQLDTKQPRQYFIGVLDIAGFEIFDFNSLEQLCINFTNEKLQQFFNHHMFVLEQEEYKKEGIEWEFIDFGMDLAACIELIEKPMGIFSILEEECMFPKATDTSFKNKLYDQHLGKSNNFQKPKPAKGKAEAHFSLVHYAGTVDYNIAGWLDKNKDPLNETVVGLYQKSSLKLLSFLFSNYAGAETGDSGGSKKGGKKKGSSFQTVSAVFRENLNKLMTNLRSTHPHFVRCLIPNETKTPGVMDHYLVMHQLRCNGVLEGIRICRKGFPSRILYADFKQRYRILNASAIPEGQFIDSKNASEKLLNSIDVDREQFRFGNTKVFFKAGLLGLLEEMRDEKLVTLMTSTQAVCRGYLMRVEFKKMMERRDSIFCIQYNIRSFMNVKHWPWMNLFFKIKPLLKSAEAEKEMATMKEDFERTKEELARSEARRKELEEKMVSLLQEKNDLQLQVQSETENLMDAEERCEGLIKSKILLEAKVKELTERLEEEEEMNSELVAKKRNLEDKCSSLKRDIDDLELTLTKVEKEKHATENKVKNLSEEMTALEENISKLTKEKKSLQEAHQQTLDDLQVEEDKVNGLIKINAKLEQQTDDLEGSLEQEKKLRADLERAKRKLEGDLKMSQESIMDLENEKQQIEEKLKKKEFELSQLQARIDDEQVHSLQFQKKIKELQARIEELEEEIEAEHTLRAKIEKQRSDLARELEEISERLEEASGATSAQIEMNKKREAEFQKMRRDLEEATLQHEATAATLRKKQADSVAELGEQIDNLQRVKQKLEKEKSELKMEIDDMASNIEALSKSKSNIERTCRTVEDQFSEIKAKDEQQTQLIHDLNMQKARLQTQNGELSHRVEEKESLISQLTKSKQALTQQLEELKRQMEEETKAKNAMAHALQSSRHDCDLLREQYEEEQEAKAELQRALSKANSEVAQWKTKYETDAIQRTEELEEAKKKLAQRLQEAEEKTETANSKCASLEKTKQRLQGEVEDLMRDLERSHTACATLDKKQRNFDKVLAEWKQKLDESQAELEAAQKESRSLSTELFKMRNAYEEVVDQLETLRRENKNLQEEISDLTEQIAETGKNLQEAEKTKKLVEQEKSDLQVALEEVEGSLEHEESKILRVQLELSQVKSELDRKVIEKDEEIEQLKRNSQRAAEALQSVLDAEIRSRNDALRLKKKMEGDLNEMEIQLGHSNRQMAETQRHLRTVQGQLKDSQLHLDDALRSNEDLKEQLAIVERRNGLLLEELEEMKVALEQTERTRRLSEQELLDASDRVQLLHSQNTSLINTKKKLEADIAQCQAEVENSIQESRNAEEKAKKAITDAAMMAEELKKEQDTSAHLERMKKNLEQTVKDLQHRLDEAEQLALKGGKKQIQKLENRVRELENELDVEQKRGAEALKGAHKYERKVKEMTYQAEEDRKNILRLQDLVDKLQAKVKSYKRQAEEAEEQANTQLSRCRRVQHELEEAAERADIAESQVNKLRAKSRDVGSQKMEE

SEQ ID NO: 154 - protein, 173 aa, Human
MASRKTKKKEGGALRAQRASSNVFSNFEQTQIQEFKEAFTLMDQNRDGFIDKEDLKDTYASLGKTNVKDDELDAMLKEASGPINFTMFLNLFGEKLSGTDAEETILNAFKMLDPDGKGKINKEYIKRLLMSQADKMTAEEVDQMFQFASIDVAGNLDYKALSYVITHGEEKEE

SEQ ID NO: 155 - protein, 984 aa, Human
METKGYHSLPEGLDMERRWGQVSQAVERSSLGPTERTDENNYMEIVNVSCVSGAIPNNSTQGSSKEKQELLPCLQQDNNRPGILTSDIKTELESKELSATVAESMGLYMDSVRDADYSYEQQNQQGSMSPAKIYQNVEQLVKFYKGNGHRPSTLSCVNTPLRSFMSDSGSSVNGGVMRAIVKSPIMCHEKSPSVCSPLNMTSSVCSPAGINSVSSTTASFGSFPVHSPITQGTPLTCSPNAENRGSRSHSPAHASNVGSPLSSPLSSMKSSISSPPSHCSVKSPVSSPNNVTLRSSVSSPANINNSRCSVSSPSNTNNRSTLSSPAASTVGSICSPVNNAFSYTASGTSAGSSTLRDVVPSPDTQEKGAQEVPFPKTEEVESAISNGVTGQLNIVQYIKPEPDGAFSSSCLGGNSKINSDSSFSVPIKQESTKHSCSGTSFKGNPTVNPFPFMDGSYFSFMDDKDYYSLSGILGPPVPGFDGNCEGSGFPVGIKQEPDDGSYYPEASIPSSAIVGVNSGGQSFHYRIGAQGTISLSRSARDQSFQHLSSFPPVNTLVESWKSHGDLSSRRSDGYPVLEYIPENVSSSTLRSVSTGSSRPSKICLVCGDEASGCHYGVVTCGSCKVFFKRAVEGQHNYLCAGRNDCIIDKIRRKNCPACRLQKCLQAGMNLGARKSKKLGKLKGIHEEQPQQQQPPPPPPPPQSPEEGTTYIAPAKEPSVNTALVPQLSTISRALTPSPVMVLENIEPEIVYAGYDSSKPDTAENLLSTLNRLAGKQMIQVVKWAKVLPGFKNLPLEDQITLIQYSWMCLSSFALSWRSYKHTNSQFLYFAPDLVFNEEKMHQSAMYELCQGMHQISLQFVRLQLTFEEYTIMKVLLLLSTIPKDGLKSQAAFEEMRTNYIKELRKMVTKCPNNSGQSWQRFYQLTKLLDSMHDLVSDLLEFCFYTFRESHALKVEFPAMLVEIISDQLPKVESGNAKPLYFHRK

SEQ ID NO: 156 - protein, 495 aa, Human
MSSNSDTGDLQESLKHGLTPIVSQFKMVNYSYDEDLEELCPVCGDKVSGYHYGLLTCESCKGFFKRTVQNNKRYTCIENQNCQIDKTQRKRCPYCRFQKCLSVGMKLEAVRADRMRGGRNKFGPMYKRDRALKQQKKALIRANGLKLEAMSQVIQAMPSDLTISSAIQNIHSASKGLPLNHAALPPTDYDRSPFVTSPISMTMPPHGSLQGYQTYGHFPSRAIKSEYPDPYTSSPESIMGYSYMDSYQTSSPASIPHLILELLKCEPDEPQVQAKIMAYLQQEQANRSKHEKLSTFGLMCKMADQTLFSIVEWARSSIFFRELKVDDQMKLLQNCWSELLILDHIYRQVVHGKEGSIFLVTGQQVDYSIIASQAGATLNNLMSHAQELVAKLRSLQFDQREFVCLKFLVLFSLDVKNLENFQLVEGVQEQVNAALLDYTMCNYPQQTEKFGQLLLRLPEIRAISMQAEEYLYYKHLNGDVPYNNLLIEMLHAKRA

SEQ ID NO: 157 - protein, 2303 aa, Human
MTSEEMTASVLIPVTQRKVVSAQSAADESSEKVSDINISKAHTVRRSGETSHTISQLNKLKEEPSGSNLPKILSIAREKIVSDENSNEKCWEKIMPDSAKNLNINCNNILRNHQHGLPQRQFYEMYNSVAEEDLCLETGIPSPLERKVFPGIQLELDRPSMGISPLGNQSVIIETGRAHPDSRRAVFHFHYEVDRRMSDTFCTLSENLILDDCGNCVPLPGGEEKQKKNYVAYTCKLMELAKNCDNKNEQLQCDHCDTLNDKYFCFEGSCEKVDMVYSGDSFCRKDFTDSQAAKTFLSHFEDFPDNCDDVEEDAFKSKKERSTLLVRRFCKNDREVKKSVYTGTRAIVRTLPSGHIGLTAWSYIDQKRNGPLLPCGRVMEPPSTVEIRQDGSQRLSEAQWYPIYNAVRREETENTVGSLLHFLTKLPASETAHGRISVGPCLKQCVRDTVCEYRATLQRTSISQYITGSLLEATTSLGARSGLLSTFGGSTGRMMLKERQPGPSVANSNALPSSSAGISKELIDLQPLIQFPEEVASILMEQEQTIYRRVLPVDYLCFLTRDLGTPECQSSLPCLKASISASILTTQNGEHNALEDLVMRFNEVSSWVTWLILTAGSMEEKREVFSYLVHVAKCCWNMGNYNAVMEFLAGLRSRKVLKMWQFMDQSDIETMRSLKDAMAQHESSCEYRKVVTRALHIPGCKVVPFCGVFLKELCEVLDGASGLMKLCPRYNSQEETLEFVADYSGQDNFLQRVGQNGLKNSEKESTVNSIFQVIRSCNRSLETDEEDSPSEGNSSRKSSLKDKSRWQFIIGDLLDSDNDIFEQSKEYDSHGSEDSQKAFDHGTELIPWYVLSIQADVHQFLLQGATVIHYDQDTHLSARCFLQLQPDNSTLTWVKPTTASPASSKAKLGVLNNTAEPGKFPLLGNAGLSSLTEGVLDLFAVKAVYMGHPGIDIHTVCVQNKLGSMFLSETGVTLLYGLQTTDNRLLHFVAPKHTAKMLFSGLLELTRAVRKMRKFPDQRQQWLRKQYVSLYQEDGRYEGPTLAHAVELFGGRRWSARNPSPGTSAKNAEKPNMQRNNTLGISTTKKKKKILMRGESGEVTDDEMATRKAKMHKECRSRSGSDPQDINEQEESEVNAIANPPNPLPSRRAHSLTTAGSPNLAAGTSSPIRPVSSPVLSSSNKSPSSAWSSSSWHGRIKGGMKGFQSFMVSDSNMSFVEFVELFKSFSVRSRKDLKDLFDVYAVPCNRSGSESAPLYTNLTIDENTSDLQPDLDLLTRNVSDLGLFIKSKQQLSDNQRQISDAIAAASIVTNGTGIESTSLGIFGVGILQLNDFLVNCQGEHCTYDEILSIIQKFEPSISMCHQGLMSFEGFARFLMDKENFASKNDESQENIKELQLPLSYYYIESSHNTYLTGHQLKGESSVELYSQVLLQGCRSVELDCWDGDDGMPIIYHGHTPTTKIPFKEVVEAIDRSAFINSDLPIIISIENHCSLPQQRKMAEIFKTVFGEKLVTKFLFETDFSDDPMLPSPDQLRKKVLLKNKKLKAHQTPVDILKQKAHQLASMQVQAYNGGNANPRPANNEEEEDEEDEYDYDYESLSDDNILEDRPENKSCNDKLQFEYNEEIPKRIKKADNSACNKGKVYDMELGEEFYLDQNKKESRQIAPELSDLVIYRQAVKFPGLSTLNASGSSRGKERKSRKSIFGNNPGRMSPGETASFNKTSGKSSCEGIRQTWEESSSPLNPTTSLSAIIRTPKCYHISSLNENAAKRLCRRYSQKLIQHTACQLLRTYPAATRIDSSNPNPLMFWLHGIQLVALNYQTDDLPLHLNAAMFEANGGCGYVLKPPVLWDKNCPMYQKFSPLERDLDSMDPAVYSLTIVSGQNVCPSNSMGSPCIEVDVLGMPLDSCHFRTKPIHRNTLNPMWNEQFLFRVHFEDLVFLRFAVVENNSSAVTAQRIIPLKALKRGYRHLQLRNLHNEVLEISSLFINSRRMEENSSGNTMSASSMFNTEERKCLQTHRVTVHGVPGPEPFTVFTINGGTKAKQLLQQILTNEQDIKPVTTDYFLMEEKYFISKEKNECRKQPFQRAIGPEEEIMQILSSWFPEEGYMGRIVLKTQQENLEEKNIVQDDKEVILSSEEESFFVQVHDVSPEQPRTVIKAPRVSTAQDVIQQTLCKAKYSYSILSNPNPSDYVLLEEVVKDTTNKKTTTPKSSQRVLLDQECVFQAQSKWKGAGKFILKLKEQVQASREDKKKGISFASELKKLTKSTKQPRGLTSPSQLLTSESIQTKEEKPVGGLSPVTQWITDSD

SEQ ID NO: 158 - protein, 303 aa, Human
MASWAKGRSYLAPGLLQGQVAIVTGGATGIGKAIVKELLELGSNVVIASRKLERLKSAADELQANLPPTKQARVIPIQCNIRNEEEVNNLVKSTLDTFGKINFLVNNGGGQFLSPAEHISSKGWHAVLETNLTGTFYMCKAVYSSWMKEHGGSIVNIIVPTKAGFPLAVHSGAARAGVYNLTKSLALEWACSGIRINCVAPGVIYSQTAVENYGSWGQSFFEGSFQKIPAKRIGVPEEVSSVVCFLLSPAASFITGQSVDVDGGRSLYTHSYEVPDHDNWPKGAGDLSVVKKMKETFKEKAKL

SEQ ID NO: 159 - protein, 246 aa, Human
MEEAKSQSLEEDFEGQATHTGPKGVINDWRKFKLESQDSDSIPPSKKEILRQMSSPQSRNGKDSKERVSRKMSIQEYELIHKEKEDENCLRKYRRQCMQDMHQKLSFGPRYGFVYELETGKQFLETIEKELKITTIVVHIYEDGIKGCDALNSSLTCLAAEYPIVKFCKIKASNTGAGDRFSLDVLPTLLIYKGGELISNFISVAEQFAEEFFAGDVESFLNEYGLLPEREVHVLEHTKIEEEDVE

SEQ ID NO: 160 - protein, 403 aa, Human [sequence omitted]

SEQ ID NO: 161 - protein, 336 aa, Human
MLQSLAGSSCVRLVERHRSAWCFGFLVLGYLLYLVFGAVVFSSVELPYEDLLRQELRKLKRRFLEEHECLSEQQLEQFLGRVLEASNYGVSVLSNASGNWNWDFTSALFFASTVLSTTGYGHTVPLSDGGKAFCIIYSVIGIPFTLLFLTAVVQRITVHVTRRPVLYFHIRWGFSKQVVAIVHAVLLGFVTVSCFFFIPAAVFSVLEDDWNFLESFYFCFISLSTIGLGDYVPGEGYNQKFRELYKIGITCYLLLGLIAMLVVLETFCELHELKKFRKMFYVKKDKDEDQVHIIEHDQLSFSSITDQAAGMKEDQKQNEPFVATQSSACVDGPANH

SEQ ID NO: 162 - protein, 604 aa, Human
MLARALLLCAVLALSHTANPCCSHPCQNRGVCMSVGFDQYKCDCTRTGFYGENCSTPEFLTRIKLFLKPTPNTVHYILTHFKGFWNVVNNIPFLRNAIMSYVLTSRSHLIDSPPTYNADYGYKSWEAFSNLSYYTRALPPVPDDCPTPLGVKGKKQLPDSNEIVEKLLLRRKFIPDPQGSNMMFAFFAQHFTHQFFKTDHKRGPAFTNGLGHGVDLNHIYGETLARQRKLRLFKDGKMKYQIIDGEMYPPTVKDTQAEMIYPPQVPEHLRFAVGQEVFGLVPGLMMYATIWLREHNRVCDVLKQEHPEWGDEQLFQTSRLILIGETIKIVIEDYVQHLSGYHFKLKFDPELLFNKQFQYQNRIAAEFNTLYHWHPLLPDTFQIHDQKYNYQQFIYNNSILLEHGITQFVESFTRQIAGRVAGGRNVPPAVQKVSQASIDQSRQMKYQSFNEYRKRFMLKPYESFEELTGEKEMSAELEALYGDIDAVELYPALLVEKPRPDAIFGETMVEVGAPFSLKGLMGNVICSPAYWKPSTFGGEVGFQIINTASIQSLICNNVKGCPFTSFSVPDPELIKTVTINASSSRSGLDDINPTVLLKERSTEL

SEQ ID NO: 163 - protein, 117 aa, Human
MRASSFLIVVVFLIAGTLVLEAAVTGVPVKGQDTVKGRVPFNGQDPVKGQVSVKGQDKVKAQEPVKGPVSTKPGSCPIILIRCAMLNPPNRCLKDTDCPGIKKCCEGSCGMACFVPQ

SEQ ID NO: 164 - protein, 464 aa, Human
MAGQDPALSTSHPFYDVARHGILQVAGDDRFGRRVVTFSCCRMPPSHELDHQRLLEYLKYTLDQYVENDYTIVYFHYGLNSRNKPSLGWLQSAYKEFDRKDGDLTMWPRLVSNSKLKRSSHLSLPKYWDYRYKKNLKALYVVHPTSFIKVLWNILKPLISHKFGKKVIYFNYLSELHEHLKYDQLVIPPEVLRYDEKLQSLHEGRTPPPTKTPPPRPPLPTQQFGVSLQYLKDKNQGELIPPVLRFTVTYLREKGLRTEGLFRRSASVQTVREIQRLYNQGKPVNFDDYGDIHIPAVILKTFLRELPQPLLTFQAYEQILGITCVESSLRVTGCRQILRSLPEHNYVVLRYLMGFLHAVSRESIFNKMNSSNLACVFGLNLIWPSQGVSSLSALVPLNMFTELLIEYYEKIFSTPEAPGEHGLAPWEQGSRAAPLQEAVPRTQATGLTKPTLPPSPLMAARRRL

SEQ ID NO: 165 - protein, 156 aa, Human
MALEKSLVRLLLLVLILLVLGWVQPSLGKESRAKKFQRQHMDSDSSPSSSSTYCNQMMRRRNMTQGRCKPVNTFVHEPLVDVQNVCFQEKVTCKNGQGNCYKSNSSMHITDCRLTNGSRYPNCAYRTSPKERHIIVACEGSPYVPVHFDASVEDST

SEQ ID NO: 166 - protein, 375 aa, Human
MDALQLANSAFAVDLFKQLCEKEPLGNVLFSPICLSTSLSLAQVGAKGDTANEIGQVLHFENVKDIPFGFQTVTSDVNKLSSFYSLKLIKRLYVDKSLNLSTEFISSTKRPYAKELETVDFKDKLEETKGQINNSIKDLTDGHFENILADNSVNDQTKILVVNAAYFVGKWMKKFPESETKECPFRLNKTDTKPVQMMNMEATFCMGNIDSINCKIIELPFQNKHLSMFILLPKDVEDESTGLEKIEKQLNSESLSQWTNPSTMANAKVKLSIPKFKVEKMIDPKACLENLGLKHIFSEDTSDFSGMSETKGVALSNVIHKVCLEITEDGGDSIEVPGARILQHKDELNADHPFIYIIRHNKTRNIIFFGKFCSP

SEQ ID NO: 167 - protein, 240 aa, Human
MLALLCSCLLLAAGASDAWTGEDSAEPNSDSAEWIRDMYAKVTEIWQEVMQRRDDDGTLHAACQVQPSATLDAAQPRVTGVVLFRQLAPRAKLDAFFALEGFPTEPNSSSRAIHVHQFGDLSQGCESTGPHYNPLAVPHPQHPGDFGNFAVRDGSLWRYRAGLAASLAGPHSIVGRAVVVHAGEDDLGRGGNQASVENGNAGRRLACCVVGVCGPGLWERQAREHSERKKRRRESECKAA

SEQ ID NO: 168 - protein, 283 aa, Human [sequence omitted]

SEQ ID NO: 169 - protein, 335 aa, Human
MLGIWTLLPLVLTSVARLSSKSVNAQVTDINSKGLELRKTVTTVETQNLEGLHHDGQFCHKPCPPGERKARDCTVNGDEPDCVPCQEGKEYTDKAHFSSKCRRCRLCDEGHGLEVEINCTRTQNTKCRCKPNFFCNSTVCEHCDPCTKCEHGIIKECTLTSNTKCKEEGSRSNLGWLCLLLLPIPLIVWVKRKEVQKTCRKHRKENQGSHESPTLNPETVAINLSDVDLSKYITTIAGVMTLSQVKGFVRKNGVNEAKIDEIKNDNVQDTAEQKVQLLRNWHQLHGKKEAYDTLIKDLKKANLCTLAEKIQTIILKDITSDSENSNFRNEIQSLV

SEQ ID NO: 170 - protein, 207 aa, Human
MNVARFLVEKHTLHVIIDFILSKVSNQQSNLAQHQRVYTGEKPYKCNEWGKALSGKSSLFYHQAIHGVGKLCKCNDCHKVFSNATTIANHWRIHNEDRSYKCNKCGKIFRHRSYLAVYQRTHTGEKPYKYHDCGKVFSQASSYAKHRRIHTGEKPHKCDDCGKVLTSRSHLIRHQRIHTGQKSYKCLKCGKVFSLWALHAEHQKIHF

SEQ ID NO: 171 - protein, 158 aa, Human
MASRSMRLLLLLSCLAKTGVLGDIIMRPSCAPGWFYHKSNCYGYFRKLRNWSDAELECQSYGNGAHLASILSLKEASTIAEYISGYQRSQPIWIGLHDPQKRQQWQWIDGAMYLYRSWSGKSMGGNKHCAEMSSNNNFLTWSSNECNKRQHFLCKYRP

SEQ ID NO: 172 - protein, 432 aa, Human
MGPAGSLLGSGQMQITLWGSLAAVAIFFVITFLIFPCSSCDREKKPRQHSGDHENLMNVPSDKEMFSRSVTSLATDAPASSEQNGALTNGDILSEDSTLTCMQHYEEVQTSASDLLDSQDSTGKPKCHQSRELPRIPPESAVDTMLTARSVDGDQGLGMEGPYEVLKDSSSQENMVEDCLYETVKEIKEVAAAAHLEKGHSGKAKSTSASKELPGPQTEGKAEFAEYASVDRNKKCRQSVNVESILGNSCDPEEEAPPPVPVKLLDENENLQEKEGGEAEESATDTTSETNKRFSSLSYKSREEDPTLTEEEISAMYSSVNKPGQLVNKSGQSLTVPESTYTSIQGDPQRSPSSCNDLYATVKDFEKTPNSTLPPAGRPSEEPEPDYEAIQTLNREEEKATLGTNGHHGLVPKENDYESISDLQQGRDITRL

SEQ ID NO: 173 - protein, 174 aa, Human
KPFRCENCNERFQYKYQLRSHMSIHIGHKQFMCQWCGKDFNMKQYFDEHMKTHTGEKPYICEICGKSFTSRPNMKRHRRTHTGEKPYPCDVCGQRFRFSNMLKAHKEKCFRVSHTLAGDGVPAAPGLPPTQPQAHALPLLPGLPQTLPPPPHLPPPPPLFPTTASPGGRMNANN

SEQ ID NO: 174 - protein, 917 aa, Human
ASPRGTEASPPQNNSGSSSPVFTFRHPLLSSGGPQSPLRGSTGSLKSSPSMSHMEALGKAWNRQLSRPLSQAVSFSTPFGLDSDVDVVMGDPVLLRSVSSDSLGPPRPAPARTPTQPPPEPGDLPTIEEALQIIHSAEPRLLPDGAADGSFYLHSPEGPSKPSLASPYLPEGTSKPLSDRPTKAPVYMPHPETPSKPSPCLVGEASKPPAPSEGSPKAVASSPAATNSEVKMTSFAERKKQLVKAEAEAGAGSPTSTPAPPEALSSEMSELSARLEEKRRAIEAQKRRIEAIFAKHRQRLGKSAFLQVQPREASGEAEAEAEEADSGPVPGGERPAGEGQGEPTSRPKAVTFSPDLGPVPHEGLGEYNRAVSKLSAALSSLQRDMQRLTDQQQRLLAPPEAPGSAPPPAAWVIPGPTTGPKAASPSPARRVPATRRSPGPGPSQSPRSPKHTRPAELRLAPLTRVLTPPHDVDSLPHLRKFSPSQVPVQTRSSILLAEETPPEEPAARPGLIEIPLGSLADPAAEDEGDGSPAGAEDSLEEEASSEGEPRVGLGFFYKDEDKPEDEMAQKRASLLERQQRRAEEARRRKQWQEVEKEQRREEAARLAQEEAPGPAPLVSAVPMATPAPAARAPAEEEVGPRKGDFTRQEYERRAQLKLMDDLDKVLRPRAAGSGGPGRGGRRATRPRSGCCDDSALARSPARGLLGSRLSKIYSQSTLSLSTVANEAHNNLGVKRPTSRAPSPSGLMSPSRLPGSRERDWENGSNASSPASVPEYTGPRLYKEPSAKSNKFIIHNALSHCCLAGKVNEPQKNRILEEIEKSKANHFLILFRDSSCQFRALYTLSGETEELSRLAGYGPRTVTPAMVEGIYKYNSDRKRFTQIPAKTMSMSVDAFTIQGHLWQGKKPTTPKKGGGTPK

SEQ ID NO: 175 - protein, 600 aa, Human
MRSCLWRCRHLSQGVQWSLLLAVLVFFLFALPSFIKEPQTKPSRHQRTENIKERSLQSLAKPKSQAPTRARRTTIYAEPVPENNALNTQTQPKAHTTGDRGKEANQAPPEEQDKVPHTAQRAAWKSPEKEKTMVNTLSPRGQDAGMASGRTEAQSWKSQDTKTTQGNGGQTRKLTASRTVSEKHQGKAATTAKTLIPKSQHRMLAPTGAVSTRTRQKGVTTAVIPPKEKKPQATPPPAPFQSPTTQRNQRLKAANFKSEPRWDFEEKYSFEIGGLQTTCPDSVKIKASKSLWLQKLFLPNLTLFLDSRHFNQSEWDRLEHFAPPFGFMELNYSLVQKVVTRFPPVPQQQLLLASLPAGSLRCITCAVVGNGGILNNSHMGQEIDSHDYVFRLSGALIKGYEQDVGTRTSFYGFTAFSLTQSLLILGNRGFKNVPLGKDVRYLHFLEGTRDYEWLEALLMNQTVMSKNLFWFRHRPQEAFREALHMDRYLLLHPDFLRYMKNRFLRSKTLDGAHWRIYRPTTGALLLLTALQLCDQVSAYGFITEGHERFSDHYYDTSWKRLIFYINHDFKLEREVWKRLHDEGIIRLYQRPGPGTAKAKN

SEQ ID NO: 176 - protein, 312 aa, Human [sequence omitted]

SEQ ID NO: 177 - protein, 114 aa, Human [sequence omitted]

SEQ ID NO: 178 - protein, 430 aa, Human
DSMTFEDIIVDFTQEEWALLDTSQRKLFQDVMLENISHLVSIGEDFTQHIALTQNVITYMRTKHFVSKKFGKIFSDWLSFNQHKEIHTKCKSYGSHLFDYAFIQNSALRPHSVTHTREITLECRVCGKTFSKNSNLRRHEMIHTGEKPHGCHLCGKAFTHCSDLRKHERTHTGEKPYGCHLCGKAFSKSSNLRRHEMIHTREKAQICHLCGKAFTHCSDLRKHERTHLGDKPYGCLLCGKAFSKCSYLRQHERTHNGEKPYECHLCGKAFSHCSHLRQHERSHNGEKPHGCHLCGKAFTESSVLKRHERIHTGEKPYECHVCGKAFTESSDLRRHERTHTGEKPYECHLCGKAFNHSSVLRRHERTHTGEKPYECNICGKAFNRSYNFRLHRRVHTGEKPYVCPLCGKAFSKFFNLRQHERTHTKKAMNM

SEQ ID NO: 179 - DNA, 15 bp, Murine
aactatggtgtacac

SEQ ID NO: 180 - protein, 5 aa, Murine
NYGVH

SEQ ID NO: 181 - DNA, 48 bp, Murine
gtgatatggagtggtggaaacacagactataatacacctttcacatcc

SEQ ID NO: 182 - protein, 16 aa, Murine
VIWSGGNTDYNTPFTS

SEQ ID NO: 183 - DNA, 33 bp, Murine
gccctcacctactatgattacgagtttgcttac

SEQ ID NO: 184 - protein, 11 aa, Murine
ALTYYDYEFAY

SEQ ID NO: 185 - DNA, 33 bp, Murine
agggccagtcagagtattggcacaaacatacac

SEQ ID NO: 186 - protein, 11 aa, Murine
RASQSIGTNIH

SEQ ID NO: 187 - DNA, 18 bp, Murine
gcttctgagtctatctct

SEQ ID NO: 188 - protein, 6 aa, Murine
ASESIS

SEQ ID NO: 189 - DNA, 27 bp, Murine
caacaaaataataactggccaaccacg

SEQ ID NO: 190 - protein, 9 aa, Murine
QQNNNWPTT

SEQ ID NO: 191 - DNA, 17 bp, Artificial
  GAPDH oligonucleotide
agccgagccacatcgct

SEQ ID NO: 192 - DNA, 19 bp, Artificial
  GAPDH oligonucleotide
gtgaccaggcgcccaatac

SEQ ID NO: 193 - DNA, 19 bp, Artificial
  EGFR oligonucleotide
gcgtctcttgccggaatgt

SEQ ID NO: 194 - DNA, 21 bp, Artificial
  EGFR oligonucleotide
agccgaggcagggaatgcgtg
